United States Patent Application Publication US 2010/0279302 A1 - sequence listing, part 2

SEQ ID NO: 1980 - DNA, 1421 bp, Saccharomyces cerevisiae
atcttacaatcaccttatcattattgggttatagcagcttaaaaacagcagaatttacattttgaaagatgagctctactttctttacatgcaactgttgtgttattcagttcaagactagtgatttgcaaagatatcacatgaagaccgaatggcacaggtacaacttaaagagaagaattgccaacctgccgccaattggtgcggaacagtttgctgagaaattgcaaatttcagaaaaggaacaagctgaaaatcaggttgatgagtttggtttccctgttctaaagcctgttatgaaccaaagtaacgctttgcctcagaaacagaagaaaccgatcaagtcaaagagaggaagaaaagttggtacgaacttattgaagaggaaagacagggatattgctaaagaaaaacagaatagatcggtgtccccttctggatcaatatcttcacaattatctaatttgacagtaggaacagaaaacacgaatacagattatggtgaagatactgtctctgaatacggtttcactagtgactctaattatgagtatgctactagtgatgaggaactagatatagcggataagccaagtgataaagaaaatgaaaagattaccatcacggaatgtatatattgcgggaaagacaataaagaagtggaaagaaatgtcaaacatatgtttagcgagcatggtcttttcatacctgaaaggtcatatttgattgatctaaacggtttactagagtttttaataaaaatgattgttattgatcataactgtctgtgttgtaactttcatggctccggtttggaaagtataagagcgcatatggcttctaagcgtcattgcaggctgccatatgaaacaaaggaggagcgtcagcttttcgccccattttacgattttacttacgatgatcactctattagcaaaaatcttcagaatgacagagcaattacttccaagctttcatctgtctatggggccaaaaatgatgaagaagatggggaggtagatatcacgttggtctcatccgaaaatgacattaatgcaaactataccaccgtatctattgatgaatctggtttagaacttaccttgccaacaggcgctaggctaggtcatcgtgcgggccagaggtactatagacaaaatttaccttcgcagccaaaccctaacgaaagcagaagaacgattacagctgctgatagaaggatggtcagtggtgttaccgagaagcaatataagaagggtatgaagaaaatgcaacaattggagaaaaatgccattaatacgcagatccgtcgcgaaattaaaagggttaactttcaaacacattacagggatgagttgttgcaataggtcatcttatgtgtctcggttaaatatctgtttacgtatctatttatgtagcat

SEQ ID NO: 1981 - DNA, 4176 bp, Saccharomyces cerevisiae
ctttccatagtaatgaaaagcgatgcctaggcaagaaacagtacaaatgcctaatggcttatggttgaacatgacaagagtgggtcaaagaggcaggagctaagatcaaatatgcgtaatcttattaccttgaataagggtaaatttaagccaacggcgtctactgcagaaggcgatgaagatgacttatctttcactttgttagactcggtatttgatacattatccgacagtataacatgtgtactcggttctacggatattggtgctattgaagtgcaacaattcatgaaggatggttccaggaatgtgttggcttcattcaacattcagacttttgacgacaaattattatcttttgttcattttgcggatattaaccaattagtctttgtctttgaacaaggtgatatcattacagccacttatgatcctgtcagtttggacccagctgaaactttaattgaaattatgggtactatagacaacggaattgcagccgcgcagtggtcctatgacgaagagacgctggccatggtgactaaagatcgtaacgtggtagttctaagtaaactgttcgaacccatatcggaataccatttagaggtagatgatcttaagatttcaaagcacgtcaccgttggttggggtaaaaaggaaacacaattcagaggtaaaggtgcacgtgccatggaaagagaagcattagccagcttaaaggcatcaggtttggtaggtaaccaattaagagatccgaccatgccctatatggtagatactggtgatgtaaccgcattggacagtcatgaaatcacaatttcttggagaggggattgtgattattttgctgtttcttctgtagaggaggtaccagacgaagatgatgaaacaaaatcaataaaaagaagagctttcagagttttttcccgtgaaggccaattggatagtgcttctgagccagtaactgggatggaacaccagttaagctggaaaccacaaggttctttgattgcgtccattcaaagaaaaaccgaccttggtgaggaggattcagtggatgtgattttcttcgaacgtaacggtttaaggcatggtgaatttgatacaagattacctctagatgagaaggtagaaagtgtatgctggaatagtaactcagaggcactagccgtagtattggcaaaccgcattcagttgtggacgtccaagaattaccattggtatttaaaacaagaattgtacgctagcgacatttcctacgttaaatggcacccagaaaaggacttcacgttgatgttttctgatgctggatttatcaatatcgttgatttcgcttataagatggcgcagggtccgacattagagccgttcgataacggtacctctcttgttgttgatggaaggacagtgaatatcactcctctagctcttgctaatgtccctcctccaatgtactatcgtgattttgaaactccaggaaatgtattggatgtagcgtgcagtttttcgaatgaaatatatgcagcaatcaacaaagatgttctaattttcgcagccgtcccaagtatcgaagaaatgaaaaaaggcaaacatccaagtatagtctgcgaattccccaaatctgagttcacaagtgaggttgactctttaaggcaagttgcatttattaacgattccattgtcggtgtgttgcttgacacagataacctttctagaatagcgcttttggatatccaggatattacgcaaccaactttaataactattgtggaggtctatgataaaatcgttttactaagaagtgactttgattataaccacttggtgtatgaaactcgcgatggtacagtttgccaattggatgcggaaggccagttaatggaaattaccaagtttcctcaattggtacgtgattttagagtaaaaagagtccataacacatcagcagaagatgatgacaactggtctgcagaaagttctgagttagttgcatttggtatcacaaataacggtaagttatttgctaatcaagttcttttggcttcggcagttacttccttggagattaccgattcctttctgttgttcaccacggcacaacacaatttacagtttgtgcatttaaattccaccgatttcaagccattgcctttggtagaggagggtgtggaagatgaaagagtgcgtgccattgaaagaggttccattttagtgtccgttattccatctaagtcttccgttgttttgcaagccacacgtggtaatctagaaacaatttatccaagaattatggtactggcagaggtaagaaagaatatcatggcaaaacgttataaagaggcgtttattgtttgtcgtacacacagaattaaccttgatattttgcatgactatgcgccagagttatttattgaaaacttagaagtatttatcaaccaaatcggaagggttgattatctcaatttatttatttcctgtttgtcggaagatgacgttaccaaaacaaaatataaggaaaccctttattcaggtatctcgaagtcatttggaatggaaccagcaccactgactgaaatgcaaatatatatgaaaaagaaaatgtttgatcccaaaacctctaaagtcaacaaaatatgcgatgctgtgctaaatgttttattaagcaatcctgaatacaagaagaaatacttgcaaacgatcattacagcatatgcatcccaaaaccctcaaaacttatcggctgcactaaaactaattagtgaactagaaaattctgaagaaaaagactcttgtgtaacttacttgtgttttttgcaagacgtcaacgtggtttataaatctgccctatctttgtatgatgtcagtttagcattattagtcgcccaaaaatcacaaatggatcctcgtgaatatctgccatttttacaagaattacaagataatgagcctttacgccgtaagtttttgattgatgattacttagggaactatgaaaaagctttggaacacttgtccgaaattgataaagatggtaatgtttcagaggaagtcatagactatgttgaatctcatgatttgtataagcatggtttagcactttaccgttatgattctgagaagcagaatgttatttataacatttacgcaaagcatttgtcatcaaatcaaatgtatacggatgcggcggtggcgtacgagatgctaggaaagctcaaagaagcaatgggggcataccaatcagcgaaaagatggcgtgaggccatgtccatcgctgttcagaaattcccagaggaagttgagtcagtcgcagaagagttgatatcttctttgacttttgaacatagatatgttgatgctgctgatattcaattggaatatttggacaatgttaaagaagccgtagctttgtactgtaaggcctatagatatgatattgcttctcttgtggcgataaaggccaagaaagatgaactcttggaagaagttgtcgatcccggtttaggcgaaggttttggtataattgcagaattactcgccgattgtaaaggccagattaattcacagttaagaagattgagagagctacgcgcgaagaaggaggagaacccatacgccttttatggccaggaaactgagcaagcggatgacgtttctgttgctccttctgagacgtcaacacaagaatcattcttcaccagatacacaggcaaaactgggggtactgcaaagactggtgcttccagacgtacagctaaaaacaagcgtagggaagagcgtaagcgtgctcgtggtaagaagggaactatttatgaagaagaatatttggttcagtcagtcggaagattgattgagaggttaaaccaaacaaaaccagacgctgtgagagttgttgagggtctttgtagacgaaacatgagagagcaagctcaccaaattcaaaagaactttgttgaagtacttgatttattgaaggctaacgttaaagaaatttattctattagcgaaaaggatagagaaagggttaatgaaaatggggaagtatattatatcccagaaatacctgttccagagattcatgatttccctaagagtcatattgttgatttttgagcataccattttcttagttatataaattactgtctatagtgctcgtaaagaaaggaaaatattcgt

SEQ ID NO: 1982 - DNA, 1793 bp, Saccharomyces cerevisiae
caaggacctcactttgcaccctccatcctcaattcctgctcccaatcggaaacttcagcggcctccgaactaacctttttttcagtcctcaattcaacctcactccatttactacaaggttcagttggtgaaagcaaaagaaaaaaacatagttaaatatagtagcaagtagaaaaactgacactggttcacgctttactttgaaaatgtcctccaaccgtgttctagacttgtttaagccatttgaatctttcctgccggaagtgattgctccagaaaggaaggttccatacaaccagaaacttatctggacaggcgtttctctactgatctttttgattctgggccagattccgctgtacgggatcgtgtccagtgagacttccgaccctctgtactggctacgtgccatgctggcctccaaccgtggtactttactggaattgggtgtttcgcccatcatcacttcatctatgattttccaatttttgcagggtactcagcttttacaaatcagacctgagagcaagcaggacagagagctgttccaaattgctcaaaaggtgtgcgctattattctgatcttgggccaagcccttgtggtcgtcatgacaggtaactacggtgccccttcggacctcggattgcccatctgtttgttgttaatctttcaattgatgtttgcatcgctgattgtgatgttattagacgaattgctatctaagggttacggcttgggttccggtatttctctgttcacggcaaccaatattgccgaacaaattttctggagagcgtttgctcctactacagtcaattccggtcgtggtaaggagttcgaaggtgctgtgattgcctttttccatcttttggctgtcagaaaggacaagaaaagagcccttgtcgaggccttttaccgtaccaatctacctaatatgttccaagtgttgatgaccgtggccatcttcctctttgttttatatttacaaggcttccgttacgaattgcccatcaggtcaaccaaagtgagaggtcaaattggtatctaccccatcaaactcttttatacttccaacaccccaatcatgttgcagagtgcattgacttctaacattttcttgatctctcaaatccttttccagaaatacccaaccaatccattgattcgtttgatcggtgtttggggtatcaggccgggcacccagggccctcaaatggccttgagcgggttggcctactacatccaaccattaatgtctttatccgaagctcttctggaccctatcaagaccatcgtctacatcacatttgttcttggttcatgcgcagtattttccaagacatggatcgaaatctccggcacttccccacgtgacattgccaaacaattcaaagatcaaggcatggtcattaacggtaagagagaaacctccatttacagagaattgaagaagatcattccaactgctgctgctttcggcggtgctaccatcggtgctctttctgttggctccgacctactaggtactttaggttctggggcatccattttgatggctactaccaccatctacggctactacgaagctgccgccaaggaaggtgggtttactaagaacctcgttccaggattttctgatttgatgtgaatataaaatgaaaataatatccaaagaaaaaaaaaatcgcatttagccacacccctccctctatttttttattttgttaccatagttttatcaacgccttcttacacctgtatagagctaaataactatatatatgtatgcgca

SEQ ID NO: 1983 - DNA, 706 bp, Saccharomyces cerevisiae
atcagtctctccactcccagtatattaataaatgcctgcgtatcactcgactttccctgtagatcctaacactgaccgcatggtagggaactttgcgcttctgcccttgaacactaagttcaggggtcctgcataccccagcaattccgattacgatattatcgacgagtgcttggacctatttcgtgccaattccttcttcaagaattttgaaattaaatcacccgccgacagagtgctcatctacggaattctctttatcaatgattgcctagcccatttgaaaataacaacgtcatttaacgaagccgtcaaagtgttaaccaatgtggccttggacaactttactttaccaggtacaccgggtttccctctgaataatgtttaccaagttccagtacaagatcataattcgatggacttgttgaagacttatattcagcaattccgtcaagaattggcaatgagactattagaaagagtctatagctctacagattctaaggaatatccctcaaagttttggttggcgttcacaagaagaagattcatgaacaaatctctataaaggtatacggtgcaaggaaaataataaaaactagaatttatgggaacataataatccacatgcaactttatttgaaccgaaaatttgaaacgggaaagaaatatataaatgtataaagtataaatacgtcaaaatatg

SEQ ID NO: 1984 - DNA, 831 bp, Saccharomyces cerevisiae
atgacacaatataatttcattatagatgcttcagcttttgaaaagggtctaggcaacatcaagaggtggtgctcggactgtacagaagctgtgactttgaacttttatattccaacattcacattaaatgaattggatttccttcaacaaaggcgtaaaagttttgcagctcgagaatccttgaagtttatcgatagattagatgattctaaatttgctaatttgaaagtttttatcgaatttcccgaagttttagacattattttatggtcagatgtaatggaacataatgatagttctggaaagattaatattgcaaaattgcctaagagattaaagaatttgttgaaaagttgtatttacaaatgctacctagaaggaaatgaggggctacattggtttttaattagtgaagatcctcaaatccgggaaatggccatgcaatgcaatattccttcctgttcaattgttgatgtagattcaatcttgtccaaggacatgaatgataaatcatttagagaaagtgaaaaattcaataatatgatgctaaaaaatggcactaaggaagaaagcgaaaacggtagagaaattatcaggactaacttcaataaaacagtttacgcttctagaggtacaggcgaattgtggtccccataaaaacaagcatttttcaaatatttcaatatcatttttgatagatggctttatcttatgagaaaaattggtaacagattattcatgtgaatgaaactctatggattatttccttgcttttgtctatctacctccttttcctagagcaggttattgagaagatatcaatggtttgat

SEQ ID NO: 1985 - DNA, 2085 bp, Saccharomyces cerevisiae
caagttttatacttaagtatcgaagaccagcaccgtggttaaaaatcttaacatgatccggttaccgaggctgtatcaaaggtacctattatacttggtagtttttgtagtgattgccctattttacttcctacaggcgccaagagttgaagagcacattggtttcgaccttgcactcccgatatcacacgttgataatctatggttccaaaataaaggtctagagggattctcaaatgacgataagctagttgtaaatataggctatgacgaatgttttcatattggtcgtttttatgaaggatgttttaatcggcatgaacttaaatcaactttaactgatgggcaccaatacttacaaaggaaaagaattcataaagacttgagaggttcctttggacgcaggtggtttggaaagtcagaatacctttactatgatgtgttataccctgctttggtggactactttggatccaacctagaaaagctaaatgttgaggcagtaactggaatttccaaatatcctaaagacaaatcgctaccctttatggatgtatccatcacattcgagcctattagcatagaactattgcagaaaaggagctacataagcgatattaacattctctttggtgttgattgcatccagccgatagcaaattggactcttcaaaaagaatttcccttagtaaaataccgctacagcgaacctgcttatttgacttacaaattcgttggtactcgtcctgtagacacaggagctcaacggctgcaagaaactgatgaaggaaagttcaaaattgttcagttggcggatctccacttgggtgtgggggagtctgaatgtatcgatgagtatccaaagcatgaagcttgcaaggcagatccaaaaacggaaactttcgttcaacaagttcttgacattgaaaaaccgcagttggttgtttttactggtgaccaaatcatgggtgatagatctattcaagactctgaaaccgtattattaaaggcggtagcacccgtcattgcaagaaaaattccgtgggcaatggtatggggaaatcacgacgacgagggaagcttaacgcgctggcagttatccgaaatagcttcagtactaccatattcccttttcaagtttagtccccatgatacacacgataatacgtttggcgttggtaattatatttatcagattttttcgaacaatgatacagaagtcccagtaggtacactttattttctggactcacataaatattctacggttggtaaaatttatcctggatatgattggattaaggaatcacagtggaaatacattgaagattatcatgatgtgaacttgaagttcaaaacaggtctttcaatggcattttttcacatcccactgccagaatacttgaatattgaatccaagacacatcccggagagaaaaatcccctcattggaatgtacaaagaaggtgttactgcacctaagtataattctgaggggataacaactttggataggttaagtgtggatgtcgtcagttgcggacatgaccattgtaacgattactgtcttcgagatgactctacgccgaacaaaatctggctatgctatggcggtggaggtggagaaggtggttatgctggctatggaggtacagaaagacgtatccgtatttatgaaattaatgtaaatgagaacaatatacacacatggaaaagattaaatggcagtccaaaagagatttttgattttcagtctatgttggacggtaattctccagaatctgtttaaattgcaatatatcagcattaaaataatgtatggctttaatcagctttgcttgatgcttagaaatcatttgatcagtgaaatacaacggatattgactgtcgatcactgatgtactaccataatacattagtctatagggtaaaggagccttgaaaatttggatggctgtcaaatggagaaataaaaggtaataacccaactggctgtttacatattctctgtgctttgtggattcgccggcttgtctaagtaatatctctatattcaaaggttttagcttgagcctattaataaca

SEQ ID NO: 1986 - DNA, 1445 bp, Saccharomyces cerevisiae
acaacctattcctaggagttatatttttttaccctaccagcaatataagtaaaaaataaaacatgttgagaactcaagccgccagattgatctgcaactcccgtgtcatcactgctaagagaacctttgctttggccacccgtgctgctgcttacagcagaccagctgcccgtttcgttaagccaatgatcactacccgtggtttgaagcaaatcaacttcggtggtactgttgaaaccgtctacgaaagagctgactggccaagagaaaagttgttggactacttcaagaacgacacttttgctttgatcggttacggttcccaaggttacggtcaaggtttgaacttgagagacaacggtttgaacgttatcattggtgtccgtaaagatggtgcttcttggaaggctgccatcgaagacggttgggttccaggcaagaacttgttcactgttgaagatgctatcaagagaggtagttacgttatgaacttgttgtccgatgccgctcaatcagaaacctggcctgctatcaagccattgttgaccaagggtaagactttgtacttctcccacggtttctccccagtcttcaaggacttgactcacgttgaaccaccaaaggacttagatgttatcttggttgctccaaagggttccggtagaactgtcagatctttgttcaaggaaggtcgtggtattaactcttcttacgccgtctggaacgatgtcaccggtaaggctcacgaaaaggcccaagctttggccgttgccattggttccggttacgtttaccaaaccactttcgaaagagaagtcaactctgacttgtacggtgaaagaggttgtttaatgggtggtatccacggtatgttcttggctcaatacgacgtcttgagagaaaacggtcactccccatctgaagctttcaacgaaaccgtcgaagaagctacccaatctctatacccattgatcggtaagtacggtatggattacatgtacgatgcttgttccaccaccgccagaagaggtgctttggactggtacccaatcttcaagaatgctttgaagcctgttttccaagacttgtacgaatctaccaagaacggtaccgaaaccaagagatctttggaattcaactctcaacctgactacagagaaaagctagaaaaggaattagacaccatcagaaacatggaaatctggaaggttggtaaggaagtcagaaagttgagaccagaaaaccaataaagaggaaaataatatcaagtgctggaaactttttctcttggaatttttgcaacatcaagtcatagtcaattgaattgacccaatttcacatttaagattttttttttttcatccgacatacatctgtacactaggaagccctgtttttctgaagcagcttcaaatatatatattttttacatatttattatgatt

SEQ ID NO: 1987 - DNA, 1147 bp, Saccharomyces cerevisiae
tagtaaaatacttctcgaactcgtcacatatacgtgtacataatgtctgaaccagctcaaaagaaacaaaaggttgctaacaactctctagaacaattgaaagcctccggcactgtcgttgttgccgacactggtgatttcggctctattgccaagtttcaacctcaagactccacaactaacccatcattgatcttggctgctgccaagcaaccaacttacgccaagttgatcgatgttgccgtggaatacggtaagaagcatggtaagaccaccgaagaacaagtcgaaaatgctgtggacagattgttagtcgaattcggtaaggagatcttaaagattgttccaggcagagtctccaccgaagttgatgctagattgtcttttgacactcaagctaccattgaaaaggctagacatatcattaaattgtttgaacaagaaggtgtctccaaggaaagagtccttattaaaattgcttccacttgggaaggtattcaagctgccaaagaattggaagaaaaggacggtatccactgtaatttgactctattattctccttcgttcaagcagttgcctgtgccgaggcccaagttactttgatttccccatttgttggtagaattctagactggtacaaatccagcactggtaaagattacaagggtgaagccgacccaggtgttatttccgtcaagaaaatctacaactactacaagaagtacggttacaagactattgttatgggtgcttctttcagaagcactgacgaaatcaaaaacttggctggtgttgactatctaacaatttctccagctttattggacaagttgatgaacagtactgaacctttcccaagagttttggaccctgtctccgctaagaaggaagccggcgacaagatttcttacatcagcgacgaatctaaattcagattcgacttgaatgaagacgctatggccactgaaaaattgtccgaaggtatcagaaaattctctgccgatattgttactctattcgacttgattgaaaagaaagttaccgcttaaggaagtatctcggaaatattaatttaggccatgtccttatgcacgtttcttttgatacttacgggtacatgtacacaagtatatctatatatataaa

SEQ ID NO: 1988 - DNA, 994 bp, Saccharomyces cerevisiae
cgccagtatgagtgcttcgaagattctttcacaaaaaattaaagttgcgttggtccaactgtcaggctcgagtcctgacaaaatggccaatcttcaaagggctgcaacgttcattgaaagggctatgaaggaacagccggataccaagttggtcgtattgccagaatgcttcaattctccgtactccactgatcagtttagaaagtattcagaagttatcaatccgaaagagccttcgacgtcagttcaatttctgtctaatttagccaataagtttaaaatcatcttggtaggaggaacaattccggaattggatccaaagacagacaaaatctacaacacctctataattttcaacgaggatggcaagttgattgacaagcatcggaaggtccatcttttcgatgtagacattcctaacggtatatcgttccatgaaagtgaaaccttgagccctggagagaagtctactaccattgacacgaaatatggtaagtttggcgtaggtatatgctatgacatgaggtttccggaactcgcaatgctaagtgcacgcaagggtgcgtttgccatgatctaccctagtgcattcaacactgtcacagggcccttgcattggcatttactggcaagaagcagggcagttgacaaccaagtgtacgtgatgttatgttctcccgcaaggaatctacagagttcttaccatgcatatggccactctatagtggtggaccctagaggcaagattgtagctgaagctggcgagggagaagagattatttatgctgaattagatcccgaagtcattgagtcatttagacaagcggtacccttaaccaaacaaagaagatttgacgtgtactccgatgtaaatgcgcattagagagaatataaagaaagatgatgatgtaaggtatacgtacatatacatatacacatacatacatatatatatatatatatatacatatatgcgtataggcagagccaacta

SEQ ID NO: 1989 - DNA, 935 bp, Saccharomyces cerevisiae
atgtcaaccaacgcaaaagagtctgccggtaagaatatcaagtatccatggtggtacggaggtgcagcgggtatctttgctaccatggtgacacatcctcttgacttggccaaagtcagactgcaggcggctcctatgcccaagcccacactcttcaggatgttggagagtatcttggcgaatgaaggtgtggtggggttatattccggcctgagcgctgctgtgttgaggcaatgtacatacacgacggtgagattcggtgcatacgacttgttgaaagagaatgtgatcccacgcgagcaattgactaacatggcgtatcttttaccttgctccatgttcagtggtgccattggggggcttgcagggaattttgcagatgttgtaaatatcagaatgcaaaacgactctgctttggaggcagcgaagaggagaaactacaaaaacgctatcgatggtgtgtacaagatatatcgctacgagggtggactgaaaaccttgtttaccggttggaagcctaacatggttaggggcatactgatgacggcaagtcaggtcgttacgtatgacgtgtttaagaactacttggtcacaaaattagatttcgacgcatccaagaactatacacacttgacagcgtccctgttggctggcctggtggccaccactgtgtgctctccagcagacgtcatgaagacacgtatcatgaacggcagcggagaccatcaaccggctttgaagatccttgccgacgctgtccgcaaagagggcccatctttcatgttccgggggtggttgccaagtttcactagactgggtccattcacaatgttaattttctttgcaattgagcaattgaaaaaacatagggttggcatgccaaaggaagacaagtaggcagatttatatacatataaacataaagatacatagca

SEQ ID NO: 1990 - DNA, 2981 bp, Saccharomyces cerevisiae
atttttcgcttaaagaacagatatcattaagaagtaaaggataatattactggagaattatctgtcctttttctctttatatttgcaaggtttttaggggtagaataaaactgatttaacagtaatccatcatatcacacaaggagcaatgtccaccgctgaatttgctcaactattggagaacagtatcttaagtcccgaccaaaacattcggttgactagtgaaacgcaattaaagaaattatctaatgacaacttcttacaatttgcaggtctttcttcgcaagtgcttatcgatgaaaatacaaagctagaagggcgtattctagcggcgctaactttgaagaacgagctggtgtccaaggactcagtcaagacgcagcaatttgcacaacgttggattacacaggttagtccagaagctaaaaaccaaattaaaactaacgcgctgaccgcattggtctccatagaaccgcgtatagcaaatgcagcagctcaattgattgcggctatagcagatattgagttgccccatggcgcatggccagagttgatgaaaattatggttgacaatacaggtgcggaacaaccagaaaatgtcaagagagcctctttattggccttgggttatatgtgtgaaagtgcagaccctcaaagtcaagccttagtttcttcatcaaacaatatcttaatcgctattgtccagggtgcgcaatctacggaaacttccaaagcagtcagactggcagctctgaatgctcttgcagactctttaattttcatcaaaaataacatggaacgcgaaggtgaaagaaactaccttatgcaagtcgtctgtgaagccactcaagctgaagatatagaagttcaagcagctgcctttggttgtttgtgtaaaatcatgtcactatactatacatttatgaaaccttacatggagcaagccctatatgcattgaccatagctacaatgaaatctccaaatgataaagtagcttccatgactgtggaattctggtccactatttgtgaagaagaaatcgatattgcctatgagctcgctcaatttcctcaatctcctttacagagttataatttcgctctctcttctattaaagatgttgtccccaatttgttgaaccttctaacgagacaaaatgaagatccagaagatgacgattggaatgtttccatgtccgcaggtgcatgcttgcagttgtttgcccaaaactgtggcaatcatatcttagaacctgtattggaatttgttgaacaaaatattaccgctgacaactggaggaatcgtgaagctgctgtaatggcctttggttccattatggatggccctgataaggtccaaagaacctattacgttcaccaagccttaccatctattttgaatttaatgaacgatcaatccctacaagttaaggaaaccactgcttggtgtattggtagaattgctgattctgttgctgaatctatcgacccacaacagcatcttccaggtgtcgttcaagcttgtttaattgggttgcaagatcacccaaaagtggccacaaactgttcttggaccattatcaacttagtcgaacaattagcagaagccacaccatctccaatctataacttctatcccgctcttgtagatggtttgatcggtgctgcaaatagaattgataatgagttcaatgcccgtgcatccgccttttcagccttgacaacaatggttgaatacgccacggacacggtagctgaaacttccgcctccatttctacgtttgttatggacaaattagggcagacaatgagtgttgatgaaaatcaattaacgttagaagatgcgcaaagtttgcaagaattgcagtcaaatatattgactgttctagcagccgttattagaaaaagtccaagtagtgtagaaccggttgcagatatgcttatgggactgttcttcaggttgttggaaaaaaaggactctgcgtttattgaagacgatgtgttttatgctatttcagctctagctgcttctttgggtaaaggatttgagaaatacctggaaacattttctccctatttattaaaggctttaaatcaagtagattcgccagtttcaatcaccgcagtgggcttcatcgctgatatttcaaattcgttagaagaagatttcagaagatattccgatgctatgatgaatgtcttggctcaaatgatctctaatccaaatgcaaggagagagttgaaaccagccgtcttgagcgtgttcggtgatattgcttccaatataggtgctgattttattccctacttgaatgacatcatggcgttgtgtgttgctgcccaaaacacgaagccggaaaacggcacattagaagcccttgattatcaaataaaagtactagaagcagtactagatgcttatgtgggtatagtagcgggtcttcatgataaacctgaagctctgttcccttatgttggtactatattccagttcattgcacaagttgcagaagatcctcagctgtacagtgaggatgctacctcaagagcagcagtcggattgattggtgatatagcagcgatgtttccagacggctcaatcaaacaattttatggacaagactgggttattgattacattaaaagaactaggagtggccaattgttcagtcaagccacaaaagatacagcaagatgggctagagagcaacagaagcgtcaattatccttataattacgatagaacttacaagctgattttggttcttttccatctttgtttcttaacatctgctgcagttaccaacgcatttacaaaccacggtttacaaagggcatttctctttgatcataattaatttgttattttacctttatgattttgttaccttctccgtcataggagagaaaacaaaatacctgcattcttctaattccagtcgcactttttagaatttccctctttttattaaagtacatct

SEQ ID NO: 1991 - DNA, 887 bp, Saccharomyces cerevisiae
tcactcagacagagcactaaactgaactagttattaaggtatgtgcagttgattcacgggaagaagatatttgaaagaaccgaaccgatgccaaaatcaaagccaaatctgggatttgccaaaaaaattttaggatatagaataaagatacgaaatatgaaaggcgaggaaaattagaattagtggagcaaataatgagcacaggtcgctaagatcattgtaactcagaatgacgtcaatcataactgggtaatgagatgtgctattgtatctactaaatctattaaacagatctttatcattccaagaccaccatacagtttagtctgcaggccattttgcttttgctttgacttttttttctgaaagattcattcatcaaaggaactagaatatctctgcgtattttgtaatataatttttgacactaacatcaattttcaccctttcttacgtctcagaacataatataacatgcctccaaagcaacaattgtctaaagctgccaaagccgctgccgctcttgctggtggtaagaagtccaagaagaagtggtccaaaaagtccatgaaggacagagctcaacacgctgttattttggatcaagaaaaatacgacagaatcttgaaggaggttccaacttacagatacgtctctgtttccgttttggttgatagattaaagattggtggttctcttgccagaattgctttgaggcacttggaaaaggaaggtatcatcaagccaatctcgaagcattccaagcaagctatctataccagagctgctgcttccgaataaatataaaatcaagaaataaggtaataagttgtttgtcttcttcttttttttgtttaatcatataataattaaatagtcatcattat

SEQ ID NO: 1992 - DNA, 478 bp, Saccharomyces cerevisiae
gtacgacaaaatatcaaggaaaaatggctagagaaatcaccgacatcaaacaatttttggaattgaccagaagagctgacgttaagaccgccactgttaagattaacaaaaaattgaacaaggccggtaagccattcagacaaaccaagttcaaggttagaggctcttcttctttgtacactttggttatcaacgatgctggtaaggctaagaaattgatccaatctttgccaccaactttgaaggttaacagattataagaaaaataaggaatgatcggagtgttatcataacgagactggaacaaaaaaaactaagaatactttcccatccgcataaagaataatatccatttgtgttcgttatacaggaagtagaaataggctttataactttttttgtttttgtttccttttgtttttcttactactcataaacatattttttaatttttaaagtcataacgttgtatagttaa

SEQ ID NO: 1993 - DNA, 1716 bp, Saccharomyces cerevisiae
cagatcaagaaaatatcaaatccaggatcacacgacaactgaacgattacatcggcctataatacgttgccatgagtttaaaggaggaacaagtgtccattaagcaggacccggaacaagaagagcgtcagcatgatcaattcaatgatgttcagatcaaacaagagtcgcaggatcatgatggagtggactcgcagtacacgaacggtacgcaaaatgacgacagcgagagatttgaggcagctgaatccgatgtaaaggtggaacccggcctcggtatgggcatcacctcctctcagagcgaaaagggtcaagttctgcctgaccaaccggagattaagttcattcgtcgtcaaatcaatggttatgtagggtttgctaatttgcccaagcaatggcacagaaggtccataaagaacggattcagtttcaatctcctatgtgtcggccctgatggtattggtaagacaactttaatgaaaactttatttaataatgatgatattgaggccaatttagtgaaagattacgaggaggaacttgcaaatgatcaggaagaagaggagggtcagggcgagggtcacgagaaccaatcacaagaacaaaggcacaaggtcaaaattaagtcatatgagtcggttattgaagaaaatggtgttaaactgaatttgaacgtgatcgatactgaaggatttggtgattttttaaataatgatcaaaaatcatgggacccgatcattaaggagattgactctcgttttgatcaatacttggatgcggagaacaaaatcaacagacattcaataaacgataaaagaatccatgcatgtctttatttcattgaacctacaggacattacttaaagcccctggacctgaagtttatgcaatctgtatatgaaaaatgtaacttgattcctgtcattgctaaatctgacatcttaactgatgaagagatcttaagtttcaagaagaccattatgaaccagttaatccaatctaatatcgagctgttcaagcctccaatttattccaacgatgatgcagaaaatagccatttatccgaaagactatttagtagtttaccttatgctgttattggttccaacgatattgtagagaactacagtggtaatcaagtgagaggccgttcctatccatggggggtgatcgaagtggacaatgacaaccactctgatttcaaccttttgaaaaatttattgatcaagcaattcatggaggaattaaaggaaaggacaagcaagatactatacgaaaactacaggtcttctaaattggcaaaacttggtattaagcaagataattcagttttcaaagagttcgatccaatatctaaacaactagaagaaaaaactttacatgaggcaaaactagccaaactagaaattgaaatgaaaacagttttccaacaaaaagtttccgaaaaggagaaaaaactacaaaaatcagaaactgaattgtttgctagacataaagaaatgaaggaaaaattaactaaacaattaaaagctttggaggacaagaaaaaacagctagaactttcaataaatagtgcttctcccaatgttaaccactcccccgtccctacaaagaagaagggatttttacgttagcgaaataaagacatataaaaatttcaaacatacactattaaatattattactattaatatataaaacgcgagacgcgtaaaa

SEQ ID NO: 1994 - DNA, 4967 bp, Saccharomyces cerevisiae
aaattgaataaaaagagccacatttttcttcgaataaatactaaaaaataaaacgaaaaagcaaggtggatattggatagttgtatcatgtccgatactaacacgtctattcccaatacaagttctgcaagggaggcaggcaatgcttcacaaactccatcgatcagctcttcatctaacacttccactaccactaacacagaatcatcctcagcttctctttcttcttccccctcgacaagtgagttgaccagcattcgtccaattggaatagtagtcgctgcttatgactttaattatcccattaaaaaagacagttcttcgcaacttttgtctgtacaacaaggggaaaccatttatatacttaacaaaaactcatctgggtggtgggatggattagttattgacgacagtaatgggaaagttaacagaggctggtttcctcaaaacttcggtagacctttaagagacagtcatctcagaaagcacagtcatccgatgaaaaaatatagttccagtaagagctcaaggcgcagcagcttaaatagcttgggcaatagtgcatatttacatgtgcctagaaatccgagcaagagcaggagggggagttctactttatcagcgtctttatcaaatgcccacaatgcagaaacaagttccggccacaataacaccgtatcgatgaataattctcccttttcagcgccaaacgatgcttcccacataacccctcaatcttcgaactttaattccaatgctagtctatcccaggatatgacaaagagtgcagatggctcatctgagatgaatacaaacgcaattatgaataacaatgaaacaaatttacaaacttctggtgagaaagcaggtcccccactagtagcagaagaaacaattaagatattaccgttggaagagatagaaatgattattaatggtatacgttcgaacattgcttcgacttggtcccccataccactgataacgaaaacatccgattacaagttggtatactataacaaagaccttgatatatactgttcagaattacccttgatttctaactcaattatggaatccgatgacatttgtgacagcgaaccaaaattcccgcccaatgatcatcttgttaacctatatactagagatctgaggaaaaatgcgaatattgaggacagttctacgagatcgaagcaatcggaaagtgaacaaaatagatcaagccttctaatggaaaaacaggattcaaaagaaactgatggaaataataacagtattaatgatgatgataataataacgaaaataacaaaaacgaattcaatgaggctggtccttcatcattaaattctttatctgctccagatttaacgcagaatattcaatcaagggtagttgccccaagtcgctcttctatactggccaagagtgacatcttttatcactattcaagagatataaaattgtggacagaattacaagacctaacagtttattatactaaaacggctcacaagatgttccttaaagagaatcgtctcaatttcacgaaatactttgatttgatatcagattcaatagtcttcacacagttaggctgcaggctaatgcaacatgaaattaaagccaaaagttgcagcaaggagattaagaagattttcaaaggtctaatctcttcattgtcaaggataagtatcaattctcatttatatttcgattcagcttttcacagaaaaaaaatggatactatgaatgacaaggataacgataatcaggaaaataattgttctaggacggaaggggatgatggtaaaattgaagtagatagtgtacatgatctagtttcagttccattgtccggtaaacgtaatgtaagtaccagtacaacggatacattgactccaatgagatcatcattcagtacagtcaatgagaacgatatggaaaatttctcagtcttaggtccaagaaatagtgttaattctgtcgtaacaccaaggacttcaatacaaaattctactttggaagatttttcaccgtccaacaaaaattttaagtcagctaaatcgatttacgaaatggttgatgtggaattctcgaaatttttaaggcatgttcagttactttattttgtgttacagagctcagtcttctcagatgataatactttaccacagttgctcccaagattttttaaaggttcatttagcggtggttcttggacaaatccattttcgacttttattacggatgaatttggtaatgcgacaaagaacaaagctgtcacatctaatgaagtgaccgcttcgtcgtccaaaaattcctcaatatcaaggattccaccaaagatggcagatgctattgcctctgcgtcaggatatagcgctaattcagaaacaaattcccaaattgatttaaaagcaagcagtgccgcgtctggttcagtttttacacctttcaaccgtccttctcataacagaaccttttcaagagcaagagtttcaaaaaggaagaaaaaatatccattaactgtagacactttgaatacaatgaagaagaaatcctcgcaaatttttgaaaaattaaataatgctacaggtgaacacttaaaaattataagtaaacccaaaagcagaattaggaatttggaaataaattcaagcacatacgaacaaataaatcagaatgttttactattggagatactggagaatttagatctgtcaattttcatcaatttgaaaaacctgattaagacacccagtattttgttggatttggaaagcgaggaatttttagttcacgccatgtcttcggtctcctcagtactaacagagttttttgatataaagcaggcttttcatgacatcgtcatcagattaataatgacaacgcaacaaacgaccttagacgacccgtatttgttttcctcaatgaggtccaatttccctgtcggacatcatgaacctttcaagaatatctctaatacacctttggtcaagggccccttccataaaaaaaatgaacaattggcactctccttatttcacgtattggtgagtcaagatgtggagttcaataaccttgaatttttaaacaactccgacgattttaaagatgcttgtgaaaagtatgtcgagatttctaatcttgcgtgtattattgttgatcaattgattgaagaaagagaaaatttgctgaactacgcagcaagaatgatgaagaataatttgactgcagaactattgaaaggtgagcaagaaaaatggtttgatatttattccgaggactatagtgatgacgattcagaaaatgatgaagctatcatcgatgacgaattaggatctgaggactatattgaacgcaaagctgcgaacatagagaaaaaccttccatggtttttaacttcagattatgaaactagtcttgtctatgactcaagaggaaaaattcgtggcgggacaaaagaggcactgattgaacatttaaccagtcatgaacttgttgatgcggctttcaatgttacaatgttaataactttcagaagtatattaaccacaagagagtttttttatgccctgatttacaggtacaacttgtatcctcctgaagggctgagttacgatgattacaatatttggatagaaaaaaagtcaaacccgattaaatgccgtgtggtcaacattatgagaacatttttgacgcagtattggacaagaaattattatgaacctggcataccactgattctaaattttgccaagatggttgtatcggagaaaataccgggggcagaggatcttttgcaaaagataaatgaaaaactgataaatgagaatgagaaagaaccagtggatcctaagcaacaagattcggtatcggcagtcgtacagacaactaaacgtgacaataaatcaccgatacacatgtcttcgtcttctttaccatcttctgcttcttcagcgttttttagattgaagaaattgaagctcttggatattgacccatacacatatgccacacaattgactgtacttgaacatgacttatacctcaggatcactatgtttgaatgcttggatagggcatggggtaccaagtattgtaatatgggtggttctccgaacattacgaaatttatagctaatgctaatacgctaactaattttgtttctcataccattgtaaaacaggcagatgtcaagacacgttcaaaattaacgcaatattttgttaccgttgcccagcattgtaaagagttgaataatttttcttcaatgactgccatagtgtccgctttgtattcctccccaatctaccgactgaaaaagacatgggatttagtttccactgagtcgaaggaccttctgaagaacctaaacaaccttatggattccaagagaaattttgtgaagtatagagagctgttgcgatccgtgacggacgttgcatgtgttcccttttttggtgtatacctatctgatttaacatttacgtttgtcggaaacccagattttcttcacaattcaaccaacataataaacttcagcaagaggactaaaatcgcaaatatagtggaggaaattataagctttaaaagattccattacaagctgaaacgattggatgatattcagaccgttatagaagcgtctttggaaaatgtcccccacattgaaaagcagtatcaattatcactgcaagtggaaccgagatcaggaaacaccaaaggcagtacgcatgcttcttctgctagcggtacaaaaactgcaaaattcctaagtgaatttacagatgataaaaatggcaattttttgaagctaggtaagaaaaaacctccttctaggttatttcgataaaagtttatacaatttgctaatcaagaagaaccttagctttatgtttgattgctacactctattatttaagatggctgcttttacttaatattcttcgtgataatactgta

SEQ ID NO: 1995 - DNA, 5754 bp, Saccharomyces cerevisiae
ctcgtttaaggcagatgagatttaccagaggattgaaagcctcttcatctttaagagcgaaagctattggaagactaactaaactttcgacgggtgcaccaaatgatcaaaacagtaatggtacaacattagatttgataactcatacattgcctattttttattccacaaatacgtcaaagatatatactataccacttacattgagtgaatgggaagtactaacttcgctttgtgttgcaatccctaccacgctcgatctggtagagacaatgcttaaagaaataattgcgccttattttctggaaactccaagacaaagaatttcagatgttctgtcctcgaaattcaagttggaacagatgagaaatccgattgaattgctaactttccagctgactaagtttatgattcaagcttgtgaacagtatcccgttctttatgaaaatataggcggcatcatttcaacttattttgagcgtgtattaaagatttttactattaaacaatctggtctactatcattagtgggctttattaatgcatttatccagtttcccaactctacagagcttactaaattcacctggaaaaagttagcgaaacttgtgcttcgtggatcatttctaaacgaagttgataagattttgaattcctcagcaacgtttaccaatgattcaatcgtccagtattacgatgctggaaatgagctatccagtgcctacttattggaattaatatctcgcttgcaagtttcgctaatatctcatctgttaaacacttcacatgtcggcgccaacttgagtgagttcttactaaatcaacaataccaattttacaaatttgatcaagaagtagccgatgaaaacgatgatacgaagtgtattgatgacttttttttcaacgtaagaagcaataaacagttttttacagacatgtgtaaaatttccctgcaattttgttctgagtcacatattctcgacctatctacagacaaccgtgcaagattttcttttgatactcgagcccactacctacaaacgctatgtttaattccgtttatagaagatacagaaagcgagctttttgaaagttttacaaacgttgtttctgaatctattgataaatttttcttatctgatgtcgttacaccatctttgataaaagcaattgtagcttctgcctcattactgaattttttcacggaaaaattgtcattaactctgattcgtatgtttcctttattggtagcgtctccacatatcacgactgaaacagttaatgatgttgcaaaaatattcaccacagggttataccctctaaatgaagatgcaattgtgagtacaatttattccatgaacaacttattagctgtttccgaggacggatcgcccgtcccggtgctccgtgagcgccaattaacaataacatctggaaaaaatattgagaaagactactttcccttgcgaaattcatctgccagtttggatggcactggtgctctgctcggaaatacaactgtgggccaactttcctcccatgatgtcaatagtggagctactatgacataccatgcctctttgatatctaattgtgtggctgcaacgactacaatcgcctcatactataacacccaaagcataacagctttgactatctctattcttacgcaaaaagttaattctatgtcaaaggaattagacggtgttattttgaattctttggcaagactggctccgaatacttcactgacagaattttcgcttttactaaagttcttcaaatcgagaactgttattgcaacaaaaattgatgatagcgcactattgaaaaatattattaaagcgaaatgtgtgatatcaaaagaattgttggccaggcatttttcaagtgacttatatttcatgtatcttcatgatctattggactcaatcattgccagtggggaagtagaacgattggaacatcacagacctcaaacggagatttcccgtgttgctgatcaaatcgctacctacttagagcccctcgccgctctactacctgttccaggcgatacgccattggacatcaataaggatgaagtcactacaaacaagtttaggaacgcctggtttaattttgtcatccatgggtaccacttgggcgggcctattgtcaaacgaaatttttctttcttattaactattgcctataattcaccaccgctggcttctgaatttcctgctaataacaaggagctttcattggaaatgaatacaattttgcgccgcggttcatctaacgaaaatatcaaacaacaaaaacagcagataaccgaatatttcaataccaatattgttcagtacagaacaacttcatcgtctaaaatcatgtttttagcggctgccgttcttctagaaacgataagatgcgaggcaggtgattgttcgaagactctactgtacttctcagacccctccattctttccggttcaattgagaagtgtattgcagttttgtcggtttccatgattagaaaatatgctaggttgattcaaaagggtaacgatgccatattcaactccaaaatgattgctcaacaacttaataacttgctactttgcctttctcatagggaaccaactttgcaggatgccgcttttcatgcctgtgaaatatttatcagatctattccatcatcgttatgtcatcatttgtctctctacaccttattagatatgttaacagccctatttgatagtatcttggactcagaggcgcataaatttgaaccacggtatgaatttaaattaaaacattctaagacaacaatattggttccaagctcatcgtcctggcgcgctacgacactatcaagattgcacaagtcagctaaagaatgggtaagaattctattgaatagaagcaaccaggatactaagattttgttgcaatcatacatatcagatctcggtgagtacagcaggctaaattctgttgaatttggtgtctcatttgccatggatatggctggtttgattttacctgcagataaggaattatcaaggcttacttattatggtccagagaaacctaacacgatttctggatttatatctttacattcttggaggtcaaaatatcttttcgataccgctattacatcatcaccagaggatatcaaaaggcaaataggtatttccactcaaaacataagaaaaaatttgaccttaggaaataagattataactaaagacgtaactgattttcttgatatggctaccgcgttgttaattcttggcaatggtgcaccagcgtcattgatatatgatattgtgcacatcccgttcgaagtcttcacctctgcatctttaaagattgctacaaacgtatggttaacaatcataactgagaagcccgaagttgcacatttgcttttagttgaagtatgctattgctggatgcgctccattgatgacaatattggtctctattctcgcgatcatgacttaaagggcgaagaataccaaaaaatggaatattccccttacgacaaagcaggtatcaacagagatgcaaaaaatgcatcccaagctatgcaaccacatcttcatgttattaaattttttgcttcccatttcgagggcacactatttcaaagtgactttttattgaaaattttcacgaaatgtgcgctttatggtatcaagaatctgtataaggcttcactacacccgttcgctagaatgattcgccacgaattattgttattcgcgactctcgtactaaacgcaagttataagcagggatccaagtatatgggccgtttgtcgcaagaaatcacaaacggtgccctaagttggtttaaaagaccagtagcgtggccattcggctcaaatgagctgaaaatcaaagcagatttatctgttactagggaccttttccttcagctcaacaaattaagctcgctaatgtcacgtcattgcgggaaagattacaagatcctgaactatttcttggcaagcgaaatccagcagattcaaacctggcttactccgactgagaagattgaaggagccgacagcaacgagcttacaagcgatatcgttgaagctacctttgctaaagatccaacattagcaataaatctcttacaacgatgttatagcaagaaagctgaggatgttttagtgggcttagttgcaaaacatgctttaatgtgtgtggggtccccaagtgctcttgacctgttcataaaaggaagccacctgagcagtaagaaagacctacacgcaaccttatactgggcgccagtgagcccgttaaaatctatcaaccttttccttcccgaatggcaaggtaattcttttatcttacaattcagcatatattcgttggaatcacaagatgtgaacttggcattcttctatgttcctcaaatcgtacaatgtttgagatacgataaaaccggatatgtcgaaagattgattttggatactgcgaaaattagtgtgttattttctcatcaaataatctggaatatgcttgcaaactgctacaaggatgatgaaggtatacaagaagatgaaatcaaaccaactctagatcgtattagggagcgtatggtttcaagtttcagccaatctcatcgcgatttttacgaacgtgaatttgaattcttcgacgaagtaactggcatatctggtaagttgaaaccatacataaaaaaaagtaaggctgaaaagaaacataagatcgatgaagaaatgagcaaaattgaggtgaaacctgatgtttatttaccttctaatcctgacggtgtagttattgatattgatcggaagagtggtaagccacttcaatctcacgcaaaggcgccttttatggcgacctttaaaataaagaaagacgtaaaagatcctttgacaggtaaaaacaaggaagttgaaaaatggcaagctgctatcttcaaagtcggtgatgactgtaggcaagatgttctagcgttacaattgatctcgctatttagaaccatttggtctagtattggcttggatgtctacgtttttccctacagagttactgcgacggcaccgggttgtggtgtcatcgatgtgctacccaattcggtatcccgtgatatgttaggacgtgaagctgttaatggattatatgaatatttcactagtaaatttggtaatgaatctactatcgaatttcaaaacgcacgaaacaactttgttaaatccttagcgggatatagcgtaatttcgtatttgttgcaattcaaggatagacataatggtaacattatgtacgatgatcaaggacattgtctacatatcgattttgggtttatttttgatattgtcccaggtggtatcaagtttgaagcagtaccattcaagctgacgaaagaaatggttaaagtgatgggaggttcgccccagaccccagcgtatctggactttgaagaactttgtatcaaggcatatctagccgcccgtccgcacgtggaggccataattgagtgtgtaaatcctatgttaggaagcggtctcccctgctttaagggtcacaagacaattaggaatctaagagcaagatttcaacctcaaaaaaccgatcacgaagctgcactatatatgaaggcgctaatccgtaaaagttatgaaagtatattcactaaaggttatgatgaattccaaaggctcacaaatggcattccgtactgatatacttcgcactttacatatgcttatataaaaatac

SEQ ID NO: 1996 - DNA, 2651 bp, Saccharomyces cerevisiae
cgaaggtaataaatactaccattattactatagatatacaatgctgtctgcacgttctgccatcaagagacccattgttcgtggtcttgcgacagtctccaacttgactagagattcaaaagtcaaccaaaacttattagaagatcattcttttattaactacaagcagaatgtggaaacgctggatatcgtaagaaaaagattaaacaggccatttacctacgcggaaaagattttgtacggtcacttggatgaccctcatggtcaagatattcagagaggtgtttcatacctaaaattaagaccagatcgtgttgcctgtcaagatgctactgctcaaatggctattttacaatttatgtccgctggtttaccacaggttgctaagccagtcactgtccactgtgaccatttgattcaagcacaagttggtggtgaaaaagatttgaagagagctatagatctaaacaaggaagtttatgatttcttggcctctgccactgcgaaatataacatgggtttctggaagccaggttccggtatcattcaccaaattgttctggaaaactacgctttcccaggtgctttgatcattggtactgactcccatacaccaaatgctggtggtttaggtcaattggctattggtgttggtggtgctgatgccgttgatgttatggcaggtcgtccatgggaattgaaggctccaaagatcttaggtgttaagttgactggtaagatgaacggttggacttctccaaaggatattattttgaaattggctggtatcacaactgtcaaaggtggtactggtaaaattgttgaatatttcggtgatggtgttgacaccttctccgctactggtatgggtaccatttgtaatatgggtgctgaaatcggtgctaccacatctgttttcccattcaacaaatctatgattgaatatttggaagcaactggtcgtggtaagatcgctgactttgctaaattataccacaaggacctattatctgctgataaggatgctgaatacgatgaggtcgtcgaaattgacttgaacactctggaaccatacatcaatgggccatttacccccgatttggctactccagtttctaagatgaaggaagttgctgttgctaataactggccattggatgtcagagtcggtttgatcggttcttgtaccaattcctcttatgaagatatgtctcgttcagcatccattgtcaaggatgctgctgctcatggtttgaaatccaagaccattttcactgttactccaggttctgaacaaatcagagccactattgaacgtgatggccaattagaaaccttcaaagaatttggtggtatcgttttggcaaacgcctgtggcccatgtattggtcaatgggatcgtagagatatcaagaaaggtgacaagaatactatcgtttcctcttacaacagaaatttcacttctagaaatgatggtaacccacaaactcatgcttttgttgcatctccagaattagtaactgcgttcgccattgcgggtgatttgagattcaaccctctaacagacaaattaaaggacaaggatggtaatgagttcatgttgaaaccaccacatggtgatggtttgcctcaaagaggttatgatgctggtgagaacacttaccaagctccacctgcagaccgtagcaccgttgaagttaaagtttctccaacttcagaccgtctacaactgttgaaaccattcaaaccttgggatggtaaggatgctaaagacatgccaatcttgattaaggccgtcggtaagacaactactgatcatatttctatggctggtccatggttgaaatacagaggtcatttagaaaacatttctaataactatatgattggtgctattaatgctgaaaacaagaaggctaactgtgttaaaaatgtatatactggtgaatacaaaggtgttccagacactgctagagattacagagaccaaggtatcaagtgggttgttattggtgatgaaaactttggtgaaggttcctctcgtgaacacgctgctttggaaccaagattcttgggcggtttcgctatcatcacaaagtctttcgctcgtatccatgaaactaacttgaaaaaacaaggtctattgccattgaacttcaagaacccagctgactatgacaagatcaaccctgatgacagaatcgatattctgggtctagctgaattggctccaggtaagcctgtaacaatgagagttcatccaaagaatggtaagccatgggatgctgtgttgacccatactttcaacgatgagcaaattgaatggttcaaatatggttctgccttaaataaaattaaggccgatgagaagaaataatgaaaacattgttataatcttttaaaggttattatttattttgtcttctgtacaccgtacccttgtttatcttttctgccttaaatttaatgacgttcggctggagaagtcaagactatgaaatatatctcgtaatttatgatcgtatattatttatttattgattgttttattgtttatttatttatttaagtacccctattgtacgtacataaaaaagcaaaacttttatattatattgttgctgattatgtactcagtttaacgaggatta

SEQ ID NO: 1997 - DNA, 650 bp, Saccharomyces cerevisiae
caaacttgaaccgtctgcgtaccagtcctaatcaaaatgttccctatcgcttccagaagaatactgctcaatgcttcagttctgccattgagactgtgcaatagaaatttcactaccacaagaatatcctacaacgtcatacaagatttgtatttgagggaactaaaagacaccaaactggctccaagtaccttgcaagatgctgaaggtaatgttaagccttggaacccaccacaaaaaccaaatctaccagaattggaacttcaaggcccagaggctttaaaggcttacaccgagcaaaatgtagaaactgctcatgttgctaaagagtctgaagagggtgagtcagagccaattgaagaggattggctagttttggatgatgctgaggaaaccaaagaaagtcattgaacttttcatagcatcctccttgtcgaagaaaaaacaaacagaaccacaagctgaacaagatcattatttttggctttcttcctctcatctttttatattcgaatccagtacaataaagaaaaagcaaaatacactacgcactctttgtaatcagccacacaaaatgcagaatttattttttaaacaaaaaatacaattgtacatagacacgtctttatctttcctattactactattct

SEQ ID NO: 1998 - DNA, 780 bp, Saccharomyces cerevisiae
ccagtacaaaaggaaaatcaaataaactcatttatattataaatgtctgccccagctgctaacggtgaagttccaacattcaaactagttcttgtcggtgatggtggtactggtaagaccacttttgtcaagagacatttgaccggtgaattcgaaaagaagtacatcgccaccattggtgtcgaagtgcatcctttatccttttacaccaacttcggtgaaattaaatttgatgtctgggatactgccggccaagaaaaattcggtggtttaagagacggttactacattaacgcccaatgtgccatcatcatgttcgatgttacttccagaattacttacaagaacgttccaaactggcacagggatttagtccgtgtttgtgaaaacatcccaattgtcttgtgtggtaacaaggtcgatgtcaaagaaagaaaggtcaaggccaagactatcactttccacagaaagaaaaacttgcaatactacgatatttctgccaagtccaactacaactttgaaaagcctttcttatggttggccagaaaattggctggtaacccacaattagaatttgttgcttctccagctttagccccaccagaagtccaagtcgatgaacaattgatgcaacaataccaacaagaaatggaacaagctactgctttgccattgcctgatgaagatgatgctgatttataagggacaaacgagaacaagctttcttttttccctaccctaaactgtatacatatttacattcatctcgatatagaaatt

SEQ ID NO: 1999 - DNA, 735 bp, Saccharomyces cerevisiae
ccaaagcaagcttattcaaccatggttacccttgaatacaatgcaaacagtaaactgatcactgcgagtgatgctgttgttgcactatctaccgaaactaatatcgatcaaataaatgttctcactacatctttgattggagaaaccaacccaaattttacaccacaaccgaatgaagctctaagcaaaatgatcaagggtttatttgaaagtggtatgaagaatttacaacaaaaaaaattgaatgaggcattgaagaatgtttctttagcaatcgaaatggcacaaagaaaaagagcgccttgggaagcttttgctattcagctaccagagctacactttatgcttcgtagtaaaatagatttatgtttaatactcggaaagcatttagaggcgttgcaagacttggatttcttacttggtacgggacttatccaaccagacgtatttgtcaggaaggcggactgtttgctaaaattgagacagtgggaagaggctagggcaacatgcgagagaggtttagctttagccccagaggatatgaaacttagagcccttttaatagaaactgcaagaaatctggccgaatataacggtgaataaggtgcataaccgaagatattttagccttttcttgatatgtctctatgctacacacgactacatagcaagaaattttagatagattcaaaaacacatagcaagcccattatcatatatactaaggaatagcct

SEQ ID NO: 2000 - DNA, 1286 bp, Saccharomyces cerevisiae
actttcgaacttttgcccaacataagatgtcctctcaagcattcacttcagtacatccgaatgcggcaacatctgatgtgaatgttaccattgacactttcgttgctaagttaaaaagaagacaagtgcaaggttcatacgccatcgccttggaaactttacaactgttaatgcgatttatctctgcagctcgttggaaccatgttaatgaccttattgaacaaatcagagatttaggtaatagtctagaaaaagctcatcctactgctttcagttgcggtaacgtaattagaagaatactggctgttttgagggatgaagtagaagaagacactatgagcacaactgtcacatccacatccgttgctgaacctttgatttcctctatgtttaatttattacagaaaccggagcaacctcatcagaatagaaaaaatagttcagggagctctagtatgaaaaccaagactgattaccgtcaagtagccattcagggtatcaaggatcttatagatgagataaaaaacattgatgaaggtattcagcaaattgctattgatttgattcacgatcatgagattttattaactcccacacctgattcaaaaaccgtattaaaatttctgattactgctcgcgaacgtagtaatagaacatttacggttttagttacagaggggttccctaataacaccaagaatgcacatgagtttgccaaaaaattagcacagcacaacatagaaaccctagtagtcccagactcagctgtttttgctttaatgtcccgtgtgggtaaggttattatcggcactaaagccgtttttgtcaatggggggactatctcgtcaaattcaggtgtatcatccgtttgtgaatgcgcccgagaatttagaacccctgtatttgctgttgcaggtttgtataagctttctcctctatatccgttcgacgtagagaagtttgtcgaatttggtgggtcccaacgtatattacctagaatggatccaagaaaaagattagatacagttaatcaaattaccgattatgttccgcctgaaaatattgatatctacattacaaacgtcggtgggttcaatccaagttttatatatcgtattgcgtgggataattacaagcaaattgatgtgcatttggataaaaataaggcgtgatgatgtgtcttttgtacattactcatgaaaataaataaaaatcttgtagatcaaaacaatttttttattattaattattagtatataatcagaatatttacgtatccttgaata

SEQ ID NO: 2001 - DNA, 931 bp, Saccharomyces cerevisiae
tgaagtagaaaatgataccaaagcttatagtttttggaggcaatggatttttaggtaaaagaatttgtcaagaagcagtgacttcgggctaccaagtcgtttctgtgtcaaggtccggtaaagctcctcatagcaatgaattaaatgataagcaatggatgcaggaggtccaatggaccgctgctgacatttttaagcctgattcttaccatgaattattgaataatgctactaacgtagttcattctttgggaatcctcctagaaaatgaaaattataagcaaactctatccaaatcccctacatatgattcaaaatcacgccttctatcttttggtgcaggtccaaatcctttaaaaaaaagcagtccttattttacttatgaaatgatgaataagcaaagtgctattattttggcagatacatttaaacaaaaaatcctaaagaaaagcaaaaaggagcaagaaaaagcaaatcaaagatcttttacgtatatttccgccgataaaggtttcccattgattcctagtggctatattaattcgaaaagagaggcggagattgaactagaaaaaatgcagagatatttcaggcctattattgtgagacccggttttatgttcgatgagcacagaaatgcaattggaccacggtcttttattcatactgcacttgaactactttactgcggtaacaaatttctattgagaaataagctgcagcttttgaacgacttgattaggccaacagtatccactcagcaggtaagcaaatccgtcctgaaaaatatcgaaaacccagattttaaaggggtagttacacttgaggaaatacttaaagcataatgattatgccattattatatttattaatctatttttctcttttatttacaaatgaaaagtacttaactatatacagcttggtataa

SEQ ID NO: 2002 - DNA, 397 bp, Saccharomyces cerevisiae
tgtaataatcttccatatccccatacaaaaactacgcaaatatggctaaagttcatggttctctagctcgtgctggtaaagtcaagtctcaaacaccaaaggttgaaaaaaccgaaaagccaaagaagcctaagggtcgtgcttacaaaagattattgtacaccagaagattcgttaacgttaccttggttaacggtaagagaagaatgaacccaggtccatccgtccaataagaaaattaacagttgtggaaaaggagcttaaaagtaacaagaaacaaaatagcagtcatgccatctttacttcaagatagtttttgacttgtatttgtatttccgttatgcgttttttactttaaatataaagcagtattgaaattatgtaagtagtgttaact

SEQ ID NO: 2003 - DNA, 1370 bp, Saccharomyces cerevisiae
tgaggtcaacaagcatcaccagagacgcctattataaactttataagagaaataccagttatacaataatgtctactggaagcagtgatagaaaggatgacgtcaaattattggaactgctgaattctatagatgaacagtttttagtgccatacaaaaagccggaagacttgcgtaaaatctcctctactaccaaactacaaggttccaccccaactaaggaactagacaaattagcctctgtattgaaggcacattgcacaaaaataggtattgtttgcaagccaggaacttttgataacaatcataaagttgtgattaccgaaatccaaaattttagtaggccattattctacttactaagtttattccctttgttttacaataacaaggattgccccaaatactttacagaccaactggatgaaagtacgctacaattgctcgatggcttgagagatttcattgccgaattacaagaaagattgaaaaatgacgaaaatgcatctctagacaaagaaaggttaacctcagttggtaaaatattcaatgcgtgcgattctctctctaattgttccaaggctggaccttatgggatcctagcaaacatcttaaaagataatgtggccataatggacgatacaatgaatgaaataaaagagtggcttgaggaacccgatttttcagcaaactcggacgatatatttttggattttgaggattcagaatccgaatctgattcacagaaagaggaatttgaccaggaaaaggtctatgaaaatataaagttgtttttcgatgggtttacgaggaagataaagctaatcaaattacttgtatcaactttcaggaaaactctggtgtcaaaagattttactcctaagaggaatcaagcagaaactttagacagtatacatacatatctgaaggaaatacagttacttttggatgaagtggtatccactgtacaatttgagccgaagaactttaccaatgaggaggtaaaagaagaacaggctgcattagttgcagtaactaaaaaagttcttatccaaatgagtaaactatatgaaggtgatccaaaaagaaagaaatggattgacacatgggagataaaattcaatgaattgttttagtatattttctctgaatgttacagtgcatggtatataatcagtcttgtttagaaattcatgctaaaacggatacaagagatatcattgtgtagctgcgagatccacggtcacggcaaaaaccatgtccattaatatagtggttggttggtgggaatatgtgggatatcctcaacaaaatcgaacttatatacgtcattctcgttaacaaattcaaattttgtagttgtcatagta

SEQ ID NO: 2004 - DNA, 2067 bp, Saccharomyces cerevisiae
caacaacaatacattacattaagattatatcagtcaagttttttcataacattgaagatctttcactcatttaagactcaataacataaaaaaaataaacctgtcattcctttgaacctttttatatccaaaaataataactgtcgctcgtttcacaacctaccttttttaaaaccactctttttccaatacattgaaattctaatttaaatataaaataattaataatagaatgtcactcctttacatcattcttctattcacacaattcttactactgccaaccgatgcctttgataggtctgctaacacaaatattgctgtttattggggtcaaaactcagcaggaacgcaagaatccttagctacttactgtgaatcttctgatgctgatattttcctattatctttcttgaaccaatttccaacccttggtttgaactttgccaacgcatgctctgatactttttctgatggcttacttcactgcacccagattgctgaagatattgaaacttgccagtccctaggaaagaaagttctattatcattaggtggtgcatctggtagctacctcttttcagatgattctcaagcggaaacttttgcacaaactttatgggatactttcggtgaaggtacaggtgccagtgagagaccatttgactcagcagtcgttgatggttttgattttgatattgaaaacaacaacgaagtaggctatagtgcgttagctaccaagttaagaactttgtttgccgaaggtacaaagcaatattacctttctgccgcaccacaatgtccatacccggatgcttctgttggtgacttgttggaaaatgcagacattgattttgcgttcatccaattttacaataattactgcagtgtgagtggtcaattcaattgggatacttggttaacctatgctcaaactgtatccccaaataaaaatatcaaactgttcttaggtttacctggttctgcttctgctgctggctctggttatatttctgacacttctttattggaatcaactattgcagatattgcctcttcaagttcttttggtggtattgcgttatgggatgcatctcaagccttttccaacgagctaaatggtgaaccatatgttgagattttgaagaatttgctaacaagtgctagccagaccgccactactacagttgccacctcaaaaacctcagcagcctcaacttcatctgcttcaacttcatctgcttcaacttctcagaaaaagaccacacaatctacgacatctacacaaagtaaaagcaaagttactttatctccaactgcaagcagcgctatcaaaacatcaattactcaaactacaaaaacattgacgagtagcaccaagacaaaatctagtctaggtaccaccacaacagagagcactttaaattcagttgctatcacaagtatgaaaactactctatcttcccaaataaccagtgctgccttggtgacccctcaaacaactactactagcatagtttcttcggccccaattcaaacagctatcactagtactctttcgccagcaacgaagagttcttctgtcgtttccctacagacagctactactagtacgctttccccaacaacgaccagtacaagctcaggtagtacaagctcaggtagtacaagctcagacagtacagctcgtacattggctaaagaattgaatgctcaatatgcggctggtaaattgaacggtaaatctacctgtactgaaggtgaaattgcatgctctgctgatgggaagttcgccgtttgtgatcatagcgcttgggtttacatggaatgtgcttctggaaccacatgttatgcttatgactccggcgactcagtctatacccaatgtaatttctcttatttggaaagcaattacttttaaagttattagagattgattcatagagtccgaatatttttttttgcaatattctttatttttcacctcatctcaccgcctctcttttatttcgtcaaggtaccctgccttcatgtttttacgtttttataatcgactactttatatct

SEQ ID NO: 2005 - DNA, 1978 bp, Saccharomyces cerevisiae
ctttcattgagtaagagccttttgttttggctgatagttatagtcaatctacaatttatctcacaaaagaaatagactaagccaaaactgcaacgaaagatcaaaaaaatgagctatgagaaaaagtctgtggaaggcgcttatattgacgattctacaacgttcgaagcatttcatctcgactctcgtttattacaagctattaagaatataggatttcagtacccaacattaattcaatcacatgctattcctttggctttacaacagaagagagatattatagcaaaggccgctacaggttccggaaaaactttggcatacctcattcctgtaattgaaactatcctagaatataaaaaaacaattgataacggagaggaaaatggtacactaggtattatacttgttccaacaagagaactggctcaacaagtatataatgttttagaaaaactagtcttatattgttcaaaagatataagaactctgaacatatcatccgatatgtctgactcagttttgagcactctacttatggatcaaccagaaatcatagttggtacacctggtaaattattggatttgttgcaaacaaagattaattctatctcattgaacgaactaaaatttttagtagttgatgaggtggatttagtgttaacatttggttatcaagatgatttaaacaaaattggagagtacttaccattgaaaaaaaatttacaaacatttttgatgagtgcaaccctaaatgacgatatacaggctttgaaacaaaaattttgtcgttctccagctattcttaaattcaatgacgaggaaataaataagaaccaaaacaaattacttcaatattacgttaaagtcagtgaatttgacaaattcttactatgctatgtcatttttaaacttaacttaatcaagggtaaaacattaatttttgtaaataatattgacagaggatataggctcaagctagttatggaacaatttggtatcaagtcctgtattttaaacagcgagctacccgttaattcgaggcaacatattgttgaccaattcaataaaaacgtttaccaactattgattgccacagatgacaccgagtacataaaagaggaagatgacgaaatagaagaagggcacaatacagaaaatcaagaagaaaaaagcttggaaggcgagcctgagaacgataagaaaccaagcaagaaaaagaaggtccaagtgaagaaagataaggaatatggtgtttctcgtggtgttgatttcaaaaatgttgcatgtgtcctcaatttcgatttacctacgacggctaagtcctacgtgcatagagtaggtagaactgctcgtggcggaaagaccggtactgcaatttcattcgtagtcccactgaaagaatttggtaagcataagccatcaatgctacagacagcaaagaaggatgaaaggattctttcacgaatcatcaaacaacagagcaaacttggattagaattacagccttacaaattcgatcaaaagcaggtcgaggcgttccgttacagaatggaagacggtttccgtgctgttactcaagttgccattagagaagctagggtcaaagagttgaaacaagaactattggcaagtgagaagttgaaaagacattttgaggagaatccaaaagagctacaaagtttaagacacgataaagaattacatccagcaagagtgcaacagcatttaaagcgtgttccagattacttgcttcctgaatcagccagaggaaatggaaccaaagtcaagtttgttcctttccacaatgctaagaagcgccattcacataaaaagggaagagtcagtaagccaaagaatggtaaagtagacccgttgaagaacttcaaatgattaataatattgatatttattctatattttatgtaaaaatctacttattaaaaatgctctttagttaaatgtgataatatagatg

SEQ ID NO: 2006 - DNA, 2106 bp, Saccharomyces cerevisiae
atggatggatcccattttcctatgaaatctactaccggagagcccgtttcaagtggtaagaagggcaagaggaggaaggtcatcaagtcatgtgcattttgtagaaaaagaaaactgaaatgcagtcaggccaggcctatgtgtcagcaatgtgtaattagaaaactaccgcaatgcgtttacacagaagagttcaactatcccttgtctaatacggaactgttcgagcaagtgcccaatgtagcgttggttcagaagattgagaatttgcagactctactgaaggaaaacgataacaataatgcgaaaccggtgtattgcaggagttcagaaaatccattacggtcactgagaacttcggttttaggtgataatggctcgaggtatgtgtttggccccacttcctggaaaactttatctttgtttgaacaaaataagtttcaaactgagtttcaaaatttatggaaagtcttgaaaccacttcctgaatgcactaaatcgcaattaaatgaaaatgatgttgtagcagatttgcctagttttcctcaaatggaaagctgtattaaatctttttttgctggaccgctgttcggcatattgcatatcttcaaccaagacgatattctgtccctcttggacagactttttattagagataccacggacaagaacctagtcatcctcctcgatttgcaaggtaatgcaaaagataagtataatcttggcattgtacttcaaattctttgcttgggctattataaccaagatatcccttcttccgtgagtcatttccttcacactttaagtgcagcgtccttgtcatcatcgagctcaaatttcgtggaaaaactacaatttttcttattgtcctatattagtgtaatgataaattgcacggacggtgtatgggatgcgactcaaggcgttgacttaatcaacgagctatgccaggggtgcataagtttgggtttaaatgatattgataaatggtatttgaacgaaagtgaggaaaccaaacaaaacttgaggtgtatttggttttgggctttattccttgatgtatccacctcatatgatataggtaatcctccgtctatttcagatgatcttttggacttaagtatatttactgcgcagaatttccaatcaccgagtattgactttaggagagttaagctaatgcacgattttttagatgtttcccgattcactactcgtgaaattcacaagagagagatgaacgaaaaattgaccactttttcattgagattgattgaatttatacaatctaacttttcacctatcgaacattatacaaattcagtttactactctgatattgatccctttgatatattgattttatcaagatctctaagtatagttgctagtatatacaatattgagatgatcatcgctcaacaaagcagaatcatagataagaacagaatggttcagttcttgttgatatccatatcagtctgtgttaatacaatggtatttcattttaaagagcctatcaacgaccaggagaacgtgttaactgaagggctaaaactgtctattattctaatcaatccacttttaatacgaatagtatcgcaagtgtacagtttagcatttaataggttaatcttcagggagaaggcattccttttccttattgaccttgacactgggaaaaaaatacaattcattaaatatgaagaagaaaactttgatgaacttttgacaggattcgatgttaggactgataaatttctgtcattttcaggaacaataataagattttacgaaattattgatagcatatttgctgttaatgaaagaaataagcgattgttaaaagcagtttccaatttttatcagttaacttcaactttggcgtttgaacgcgtaagtagggttttattcgataaagcgtcccaagcaagaatagagactgaaaaaatttggctgaaaaagggcattaatatggagcacttcagtgatctcatgattgaagattttattaatgatgtttggaaaacgttcaaagagatttccaaagacctttggtccattgacaaaaagaaattttataaacaatatcatttcgatttataa

SEQ ID NO: 2007 - DNA, 1149 bp, Saccharomyces cerevisiae
atggattctgagttgaaagggcagcagctaagtgatgcagaatggtgtgttaaaaaaattaatggtgagggaaattgtctcctattatttctaccgatgtcatctccaaccacaattgtaatgattgttttagtttccttggagcgcttagttccctacgttttcaaactttcacaaactcaattatcacagcaatgccagagccaaggttttacggatagtatatcattaaatctaattaaactaaaactaatggacattctacaagctcctcaagaaattaaccaaattggattggtagattcaaatttggtttttagtttcgatgtatctgcggatattacagtttccataaatagcgtaccttcacatgttactaaggatatgttctatatgattttgcaaagtttatgcatgcttttattaaaattggtaaacctttccacccaataccactatgtacaacgggatattttgaatgaaaagcaaaaatgcttagattttcttttaatttctcttcgtgatttagacggtgggagtaaagttatcagtcaatgggctcctgaaaattctaagaattatgaatctctgcagcaatgcacagacgatgacataatcaaaaaattactacataaaggaaaattccagcatcaagaatttctggcggactcattaaaaacattattatctttaagaaacaaatttcaagatgtgtcgcggtttgaagaatctggagaacttaacaaaaaagagcgcgtcagatttcctgcggtgaatcatttttataatgatgattttgaattgcaagcagaccctacaaatgaggctcgaccaaatagccgcggtaaaattaaaccaaagacagatttcaagccaaaatctagagaaagtagtaccagttcgcaacttcgcctggagaatttttctgaatctgaggctacaccagaaaaaacaaaatcaagttcttctttggtcgaagaatacccacagaaaaaaagaaaatttggaaaggtgagaataaaaaactaaggcaagtcaattaaacgtcaaaaattaaggttggacctttcaaatagttctattcctttgttgacgcattgataatgttaatttattgaatggtaacgttatgccattgatagggagcat

SEQ ID NO: 2008 - DNA, 290 bp, Saccharomyces cerevisiae
aaaaccctaagcaatcatgtctagtcgccaaggtggtaagatgaagcctctaaagcaaaagaagaagcaacaacaggacttagatcctgaagacattgccttcaaagagaagcaaaaggccgatgctgctgctaagaaagctttgatggctaatatgaaaagtggtaaacctttagtgggtggtggtatcaaaaaatctggtaagaaataaaaggcctttaacaacgtctaataaaaatttactcagtattttctagttctcgttttttaagtaaatacatatattacca

SEQ ID NO: 2009 - DNA, 648 bp, Saccharomyces cerevisiae
atgagcagatccgggaaatcattgacaaagtacaaaattgtttttttgggagaacagggtgttggaaaaacatcgctgatcactagatttatgtatgatacgttcgatgatcattaccaagccacgattggtatagattttctttccaagaccatgtatttggatgataagacaattagattacagttatgggatacagcaggtcaggaaagatttagatcattaataccttcatatatcagagattcgagagttgctattatcgtttacgacattacgaagagaaaatcatttgaatatattgataaatggatagaagacgttaaaaatgaaagaggtgacgaaaatgttatattgtgcattgttggtaacaaaagtgatttatcagatgaaaggcaaatctcaaccgaagagggagagaaaaaagcaaaactattgggtgctaaaatctttatggaaacgtccacaaaggcaggctataatgtcaaagctttattcaaaaagattgccaaatcgctgcctgaatttcaaaacagcgagtcaactcctttggatagcgaaaatgcaaatagtgcaaaccaaaataaaccgggagtcattgatatttctacagcagaggagcaggaacaaagcgcttgtcagtgttag

SEQ ID NO: 2010 - DNA, 1826 bp, Saccharomyces cerevisiae
ccacgagaaaacatcataagcaaaaaagttttcaaaatgttgagatcatccgttgttcgtagtcgcgctactttaaggcctttattgcgtcgtgcttactcctctcataaagaattgaaattcggtgtagaaggaagagcctcccttcttaagggtgtcgaaactttagctgaagcggttgctgctactttgggtccaaagggtagaaacgttttaatcgaacagcctttcggtcctccaaagattactaaggatggtgttacagttgccaaatctattgtgttgaaggacaagtttgaaaatatgggtgccaagttactacaagaagttgcctccaaaaccaatgaggctgctggtgacggtactacttctgctactgtcttaggtagagccatcttcacagaatccgtcaaaaatgtcgccgctggttgtaaccctatggatttgagaaggggttctcaagttgcagttgaaaaagtgattgaatttttgagcgccaacaagaaagaaattaccacatctgaggaaattgctcaagtagcaaccatttctgccaatggggactctcatgttggtaagttactagcttcagctatggaaaaggttggaaaagaaggtgtcatcactatcagagaaggtagaacattggaagatgaacttgaggttactgaaggtatgaggtttgatcgtggttttatttctccatacttcatcactgatccaaagtcgagcaaggtggaatttgaaaagccattgctattgttgagtgaaaagaaaatttcttccattcaagatatcttgccagctttggaaatttccaatcaaagcagaagacctttgttgatcattgctgaagatgttgacggtgaagctcttgcggcttgtattttgaacaagttgaggggtcaagttaaggtttgtgctgtgaaggcgcctggtttcggtgataatagaaagaatacaattggtgatattgcagtcttgacgggcggtactgtttttactgaggagttggatttgaaaccagaacaatgtaccatagaaaacttgggttcttgtgactctattaccgttactaaggaagacaccgttatcctgaacggtagtggtccaaaggaagctattcaagagagaattgaacaaatcaaaggctccatcgacattaccaccacaaattcatatgagaaggagaaactgcaagagcgtttggccaaattgtccgggggtgttgctgtcatcagggtcggtggtgcatctgaagttgaagttggtgaaaagaaggaccgttacgatgatgctttgaacgctaccagagctgcagttgaggaaggtatcttgccaggtggtggtactgccttagtgaaggcatctagagttttggatgaagttgttgtcgacaatttcgatcaaaaattgggtgtcgatatcataagaaaggccattacaagaccagccaagcagatcattgaaaacgctggtgaagaaggttcagttatcatcggcaaattgattgatgaatatggtgatgattttgccaagggttacgatgcctctaagtcagaatacaccgacatgttagccactggtatcatcgatccatttaaagtggttagatccggtttagttgatgcttctggtgttgcctcactattagctactaccgaagttgctattgttgatgccccagaaccaccagcagctgctggcgctggtggtatgccaggtggtatgccaggaatgccaggtatgatgtaacgaccgccttaattcaaaatttatctttcgtttaaatatggtaataattttattatcttgtaaatacaatg

SEQ ID NO: 2011 - DNA, 429 bp, Saccharomyces cerevisiae
atgaaagtaggtggcatagaagacagacaactggaagccttaaaaagggcggcactgaaggcgtgtgaactctcctatagcccctattctcacttccgtgtcggttgttccatattaacaaataacgatgttatcttcactggtgctaatgtcgagaatgcaagctacagtaattgtatatgtgcagaacgatctgctatgatacaagttctaatggcaggccatcgctcaggatggaaatgcatggtcatttgtggcgattctgaggaccagtgtgtttccccttgcggcgtttgcaggcagtttatcaatgaatttgtggtcaaggactttccaatagtcatgcttaattccacaggttctcgttctaaagtcatgacaatgggagaactgctgcccatggcttttggtccatctcatttaaactag

SEQ ID NO: 2012 - DNA, 1323 bp, Saccharomyces cerevisiae
attttttacttattttttttttttttcatttttcatataaagaagaaaaactgatattattattattcatcccaagaacgctattgtgtatattcctagcaagaaaaaaataagcaaaaaaattgtataatgagcactgcaactacaacagttactacctccgatcaggcttctcatcctaccaagatatattgctccggtttgcaatgtggtagagaaacttcgtcccaaatgaaatgccctgtttgtctaaaacaaggcatcgtttccattttctgcgacacaagctgttatgaaaacaactacaaagctcacaaagctttgcacaatgctaaggacggcttggaaggtgcttatgatcctttcccaaaattcaaatattctggtaaagtgaaggcttcatatccacttaccccaagaaggtatgtccctgaagatattcctaaaccggactgggccgctaatgggctaccagtcagtgaacaaagaaatgatagacttaacaacatccctatatacaagaaagatcaaattaagaagattagaaaggcatgtatgttgggtagagaagttcttgatattgccgctgcccatgtcagaccaggcatcactacagatgaattagatgaaatcgtccacaatgaaacaattaagagaggtgcctacccttcccctcttaattattacaactttcctaaatcgctttgtacctctgtcaatgaagttatttgtcacggtgtgcccgataaaactgtcttgaaggaaggtgatattgtcaatttagatgtttccttatactaccaaggttatcatgcagacttgaatgagacatattatgtcggcgaaaacatttctaaggaagctcttaatactactgagacctcaagagaatgtttgaaactagccattaaaatgtgtaagccaggtaccaccttccaagagttaggtgatcatattgaaaaacacgctaccgaaaataagtgcagtgtagtaagaacttattgtggacatggtgttggtgaatttttccattgttccccaaatattccccactacgccaagaatagaacacctggtgttatgaaaccaggtatggttttcaccatcgaacctatgattaatgaaggtacttggaaggatatgacctggcctgatgactggacttctaccacccaagacggtaaactgagtgctcaatttgaacatacactgttggttaccgaacatggtgttgaaatcctaacagccaggaataagaaatcaccaggtggcccaagacagagaattaaatagatctaggtatttttatcttatacatataga

SEQ ID NO: 2013 - DNA, 966 bp, Saccharomyces cerevisiae
atgatttgcataacgtgcatgcggcccgtagattccctttatacagtgtactcgaatgaccacattcagctgacagattgtccatattgccaagagacagtagacaaatatgttgagatagataatgtcctgttattcattgatttgcttctattaaaagcaggtgcatatagacacttggtattcaatgctttggaattgcatctctcaaaatatccgaaaagaaaagcgctaaatgattgccagtgtttgcgtgactatacgcaagctttgttatttaacgtaaagaactggttttgtaaatatgaccggttaaatcgcctttggcttctactattatcattcgagatttatttaacttgggttactgaggagagtaaatacatctactatttgaaccgtaacaataatgatggtaagctcatcatgctttcaaaaaaattaccagagagcttcaaatgggactcggcaatcatgcgcaataccattacaagtaaagtgtttacctggagcccaccaatacaatatctttactttgcaagttattgtattcttgacgtttctttattccacacctttacccagtatttcatactgaaaaagttgcattggaagcactattccgtttcttcaaaggatgtcatatcatatacgatcttattatcgtacggtgccaaaatttttccgatattgatgttgatatggccttatgatactctaatttcgatgagtatcattaagtgggtagctaatctctatattattgaatcgttgaagattgtaactaatctttcctattggaatatcataaagatttttataagtgtgtctttattacgatatttcatggttaagccaatacttatagttttcgtggcaaagtttaacttttcagttattaagaatttaatacatcaggagtttatactactactacagaagtcaggaacttatttattgttataa

SEQ ID NO: 2014 - DNA, 1472 bp, Saccharomyces cerevisiae
tgtggaaaaaagaaacaaactggtaattatggagaaagctttggaattagacggagaatatccggaatctctgagggatgaattcaacatccctacatttaaatccatgggactatcgtccgacgataagcctgtgacgtacttatgcgggaattctttaggtttgatgccgaagtcaactaggaattcaattaatgctgagctagatgcgtggagcgattgtgctgtggaatcgcatttcaaacatcctgaagaagccagaggaaaggtgccttgggtcagcattgacttacctattcttccactactagcccccatcgtgggtgctcaagaaaatgaagttgcagtaatgaatagtctcactgcaaatttgaattcattgttaattacgttttataaacctactgagaaaagattcaagatcctttttgaaaagggctcctttccatcagactattatgctttctacaaccagtgcaaaattcatggaatttcggaacctgagaatgtttttattcagatcgagccacgcgagggagagacttatatcagaactcaagatatcctggataccatagaggtaaatcaagatgaattggcgctggtctgtttgtcaggtgttcagtattacacggggcaatatttcgatattggccgaatcacctcatttgcccaccaattccccgacatattggttggatgggatttagcacacgctgtagggaacgtcccattgcaacttcatgattggggtgttgactttgcctgttggtgttcttacaagtacttgaatgccgggcctggtggaattggtggcttatttgtccactcgaagcatactaaaccagaccctgctaaggaaagtttgccaagattagctggttggtggggcaatgatcctgctaagcgatttcaaatgctggaagtattcgagccgattccaggagcattgggattcaggcaatctaatccaagcgttattgacacagtggcattgagaagttcattggaattatttgcgaagtttaatggtattaatgaagttcgtaaaagatcgttgttgctgacgaactatatgacggaactgttggaagcctccaagtattacaaacaccctttaaggatcgagaaattaccatgtttttttacaatattaactccaacaagcacagatgaagaacatggcgcccaattgtcactttacttcgattctgacactggaaaagaggatattatgcccaaagttttccaatatttgcatgaccatggtgtcattggcgatgcaagaagaccaaacgtaattagattggctcctgctcccttatataatacattttcagatgtatacattgcggtgaatgcactaaatgaggcgatggataagttgtagtcctagagtgaccgcatcgccttcatcttcttttggatattatatatgacgtagtttgaaattcgtatacttactgatagcg

SEQ ID NO: 2015 - DNA, 642 bp, Saccharomyces cerevisiae
atgcaaacgctaaagtgtgttgttgtcggtgatggtgctgttgggaaaacgtgccttctaatctcctatacaacgaatcaatttccagccgactatgttccaacagtgttcgataactatgcggtgactgtgatgattggtgatgaaccatatacgttaggtttgtttgatacggccggtcaagaagattacgatcgattgagacccttgtcatatccttctactgatgtatttttggtttgtttcagtgttatttccccaccctcttttgaaaacgttaaagaaaaatggttccctgaagtacatcaccattgtccaggtgtaccatgcctggtcgtcggtacgcagattgatctaagggatgacaaggtaatcatcgagaagttgcaaagacaaagattacgtccgattacatcagaacaaggttccaggttagcaagagaactgaaagcagtaaaatatgtcgagtgttcggcactaacacaacgcggtttgaagaatgtattcgatgaagctatcgtggccgccttggagcctcctgttatcaagaaaagtaaaaaatgtgcaattttgtagtcatattagtatatgcccatcttttcttaatctatatctaaaattaacttatatatacaccttcct

SEQ ID NO: 2016 - DNA, 2553 bp, Saccharomyces cerevisiae
gtaagccatactacgtacaatatggatctgaaaacctcatataaaggtatatcgttaaaccctatttatgcaggaagcagtgctgttgccactgtttcagaaaatggtaaaatactagctactccggtgcttgacgaaatcaacataatcgatttaaccccaggctccagaaaaattttgcacaagatttctaatgaagacgagcaagaaattactgcactgaaattaactcctgatggtcaatatctcacgtatgtttcacaagctcagcttttaaaaatctttcaccttaagaccgggaaagttgtcagatcaatgaaaatctcttctccatcgtacattctcgacgcagattccacttcaacgcttctcgcagtcggagggacagatggtagtataattgttgtggatattgaaaatggttacattactcattcgttcaaaggtcatggtggtacaatttccagtttgaagttttatggacaattgaatagtaaaatatggttattagcatccggtgacaccaatggtatggtaaaggtttgggatcttgttaaaaggaagtgcttgcacacattacaagagcacacatctgctgtgagagggttggatatcattgaggtaccagataatgatgagccaagcctaaatttactttccggtggtagagacgatatcatcaatctctgggatttcaatatgaaaaagaaatgtaaattgttgaaaacacttccagtaaatcaacaggtagagtcatgcggattcctaaaggatggtgacggtaaacgcataatttatacagccggcggtgatgctatctttcagttaattgactctgaatctggtagcgtgcttaaaagaaccaataaacctatagaagagttattcattattggtgtacttccaatattgagcaattcacagatgtttttagtattgtctgaccagacattacaactaattaacgttgaagaagacttaaagaatgatgaagacacaatacaggtcacttcgagcattgctggtaatcatggtattattgctgacatgaggtatgttggcccagagctgaataaattagctttagctaccaattctccatcgcttaggataatacccgtccccgatttatcaggcccagaagcttcgctgcctttggatgtcgaaatttatgaaggtcatgaagatttgctaaattcattggatgctactgaggatggcctgtggatcgcaaccgcctctaaagataatacggctattgtttggagatacaatgagaacagctgcaagtttgatatttatgccaagtatattggtcattcagctgccgtaactgctgttggattgccaaatatagtttcaaagggatatcctgaatttttattgacagcatcgaatgatttaacaattaagaaatggataattccaaagccaactgctagtatggatgttcaaatcatcaaggtatccgaatatactcgtcatgcccatgaaaaggatatcaatgctttgtcagtttctcctaacgattctatttttgcaacagcatcatacgacaagacctgtaagatctggaacctagaaaatggtgaattggaagccacgttggccaaccacaagcgtggactatgggatgtatcattttgccaatatgataaattattggcaacttcttcaggtgataaaacagtcaagatatggtcattggatacattcagcgttatgaaaacattggaaggtcataccaatgcggttcaaagatgttcgtttattaataagcaaaaacaactgatcagttgtggtgctgatggcttgatcaaaatatgggattgttctagcggtgaatgtctgaagactttggatggtcataataatagattatgggctttaagtactatgaatgatggtgatatgatcgtaagtgctgatgcagatggtgtttttcagttttggaaagattgtacggaacaagaaatagaagaagaacaagaaaaagctaaattacaagtcgaacaagaacaatcgcttcaaaattatatgagcaaaggtgattggacaaatgcatttttgttagcaatgactttagatcacccaatgaggttgtttaatgttttgaaaagagctttgggcgaatcaaggtctagacaagataccgaagagggcaaaattgaagtcattttcaatgaagaattggaccaagccatctctatcctaaatgatgaacagttaattttgttaatgaaacgatgcagagattggaatacaaatgcaaaaacacataccatagcgcaaagaacaataagatgtattttgatgcatcataacatagcaaaattgagtgagatacccggaatggtaaagatagttgatgcaataattccatacacgcaaaggcatttcacaagggttgataacttagttgaacaaagttacatattagactacgcgctagtggaaatggataagctattctaggcagtaagtccaagatattgagcctttaaaagcaaggcaatagcaacatattattttgtaaactagatatataaagac

SEQ ID NO: 2017 - DNA, 913 bp, Saccharomyces cerevisiae
aatagcacggaaagaactagccataatatattatacaggatgtcggcaggtgatatatcagccataaatatcaagtctgtcaaaaaaaacagaaggaggaagaagagaagaacagctgatgtttcatcatcagattcttcatcatcggatccatcatcagaaagtgaaaaggaggaaatccaaaatggggccatcgaagaacacgttggagaaaatggtaaaagtgatcatgttttctcaaaaggtaatgacgaagacaaacaagaggacattgcaatagaagtttcggatgtcgagcttacagacgaagaaagcaaggatttgaagttaaattcaaaagaagtgatagacgatttaaccaaaatttctttgagcaagatcccagagcctacgaaatctcaaaacaaggagggttttatgaatgcatcgaaaattgccgaaaatatcaagcttgcgagagaagaatacaatgaattggcagaaaactttgtgcccaaagggaaagacaagacaaagttaagggaagaatacttaaatttactttttgaaaactacggtgatgatatcaatcgtcttagagctgccccggatttcacgaataaatcactatccattttggcagatgctctgcaggaaggcataggaatgtttgatattggtgaactagaattggtcttgaaaaataaagaaatggagaactgaaaaatattgctttaaatctttttctaaaagtttgtcatgtttccgcggagaatatattgacgtgcacattaattatttagataattcttcgatttttaatgaagagcggtcctgatccaagttgtgcttcatatggtataaagctgattccagtatactgcacgagaagtatatgtatgtattttgtaatttatataaaggcaaaaaaaag

SEQ ID NO: 2018 - DNA, 1180 bp, Saccharomyces cerevisiae
gtaagacaatattcaggcgatcaaggagtaaaaatgactagacctaaaactttttttgatatttctattggaggtaaaccccaaggccgtatagtttttgagttgtacaatgacatagtgcctaaaacggctgaaaattttttgaagttgtgtgaaggaaatgctggtatggcaaagactaaacctgatgtaccattgtcgtacaagggttccattttccacagagtgatcaaagacttcatgtgtcaatttggtgattttaccaattttaatggtactggcggtgagagcatatacgatgaaaaattcgaggatgaaaatttcactgttaaacatgataaaccattccttctatccatggccaacgccggtccaaataccaatggatctcaagctttcataacctgtgttcctacacctcatttggacgggaagcacgttgtgtttggtgaagtgattcaaggtaaaagaattgttcgtttgattgaaaaccaacaatgtgaccaagaaaacaacaagccattgcgtgatgtaaagattgatgactgtggcgtgttacctgacgattatcaagtgccagagaatgccgaagctacaccaacagatgagtacggcgataattatgaagatgttttaaaacaagacgaaaaagttgacttgaagaatttcgacaccgtcttgaaagctatcgaaacggtaaagaacattggtactgaacagttcaagaaacagaactattccgtggctttagaaaaatatgtcaaatgtgataaattcttgaaagagtatttcccagaagatttggagaaggaacaaattgaaaaaatcaatcaattgaaagtgtctattccattgaatattgccatctgtgctcttaaattaaaagattacaagcaagtattagtagcctcatcggaggtgttatatgccgaagcggctgacgaaaaagccaaggccaaagctttgtaccgtcgtggcctggcctattaccatgttaatgacacagatatggctctcaatgacctagaaatggccactactttccagccaaatgacgctgccattttgaaagctattcataatactaaattaaaaagaaagcaacaaaacgaaaaagctaaaaagtctctttcgaagatgttctcctgattacttgcattatatatatgcttatatgttt

SEQ ID NO: 2019 - DNA, 1723 bp, Saccharomyces cerevisiae
gacattcagaaaatatcaccgggtaacagaacgcgttaatattatcttttgggaaatttcattaaatgtaataaataataatcgtaacagtagctgcgaaatgaacaaatgcgtaatatcggttagtcacatgtataagaattcaacatataactatctatgggtggagaaattattactttgcaagcaggtcaatgcgggaaccacgttggtaagtttctctggtctcaattggcgaaagaacacgctataggcaccgatgggctatctcagcttcctgattccagtacggaaagagatgatgacacaaagcctttcttccgcgaaaacagtaggaataagtttacgccaagggctattatgatggattccgagcctagtgtcatcgccgacgtggagaacacatttcgtgggtttttcgacccaagaaatacctgggtagcttctgatggcgctagcgctggtaattcttgggccaatgggtatgatataggaactcgtaaccaggatgatattcttaacaagatcgacaaggagattgattctaccgacaatttcgaaggtttccagttgctgcactcagtagccggagggaccggttcagggctcggatccaacctcttagaagcgctgtgtgatcgatatcctaaaaaaatactcacgacatattctgtgttccctgcaagatcttctgaggttgttgttcaatcttataacactattctggctttgagaagactgatagaagatagcgatgcaacggtggtgtttgataacgcttcgttgctgaatatttccggtaaagtgtttagaaatccgaacatcgatttacaacacacgaatcaattgatatcgaccataatatcttcagtaacgaacagtatacggtttccgagttacatgtattcatccatgtccagtatttactctaccttgattccttctcctgaacttcatttcctaagccctagtttcactccatttacatcagattatattcacgatgatatagcgcataaaggccattccagttatgacgtcatgttagatttattagacccttccaattctcttgtctctaccgcgatgaacaatccaacatattttaacgtttataatacaatcattggtaatgtagaacctcgtcagatatcgcgtgctatgaccaaattacaacaacgcatcaaattcccctcatggtcctcttctgcgatgcacgttaacattggaagaagatcgccatacttgcctttacaaccaaatgaaaacgaagttagcggcatgatgttaagcaatatgtctaccgtggtgaacgtctttgagaatgcgtgcaatacttttgacaaagtatttgccaagggcgcatttttaaataattataatgtaggcgacttgttccaatcaatgcagaacgttcaagatgaattcgccgagtcaagagaagtagtacaaagcctgatggaggattatgtagctgcagaacaagattcgtacttggacgatgtacttgttgatgatgaaaatatggttggcgagttggaagaggacctggatgccgacggtgatcataaattagtataatgatgccttccttgttcaggaattttaccaccgcccaatagttttattatagtactctcaatatatctataccaacaaccgcttcaaatgtattatctccctttataaattctgcactgtattgtaatatgtataaagctct

SEQ ID NO: 2020 - DNA, 1019 bp, Saccharomyces cerevisiae
actccgaataaacttaaaagatgagtgatatcttgaacgtaagtcaacaacgtgaagcaattaccaaggccgctgcgtatatttctgctattttagaaccacatttcaaaaatacaacaaatttcgagcctccgagaactttgattatatgtggttcagggcttggtggaatatctaccaagctgtctagagacaatccacccccggtaacagtcccataccaagacatcccaggattcaagaaaagtacggttccaggtcattccggtacactaatgttcggatctatgaatggttcaccagtagtattaatgaatggtcgtcttcatggatatgaaggcaacacattgtttgagactacttttcctattagagtgcttaaccacatgggtcatgttcgtaatttaattgtcactaatgccgctggtggtataaacgcgaaatatcaagcctgcgatttgatgtgcatttatgatcatttaaatatccctggccttgctggccagcacccattgagaggtcctaacttggatgaagatggacctcgttttttagccttgagtgatgcatatgatctggagttgaggaagcttttatttaagaaatggaaagagctcaagattcaaaggccactgcatgaaggtacttatacttttgtatctggacccactttcgaaacaagagcagaatccaaaatgataaggatgttgggaggagatgctgtcggaatgagtactgttcccgaagtcattgttgcaagacattgcggatggagggttttggccttaagtttgattaccaatacttgcgtggtggatagccctgccagtgcgttggacgaatcacctgtacccttagaaaaaggcaaagcgactcacgctgaagtactggagaatggtaaaatcgcctctaatgacgtgcaaaacttaattgctgccgtaatgggggaattataattgttataacttaaatacctctatttattacatagcgggaagatgtaccttcggccggtagaa

SEQ ID NO: 2021 - DNA, 1473 bp, Saccharomyces cerevisiae
cagaacactgtagatattgcgaaggtggacttaaagtagtttggcaaacttgtacttccagaactatgaccgtgctatatgctccttcgggtgctactcagctatatttccatctgctaaggaagtcgccacacaacaggctagttgtctctcaccaaacacgtcgtcacctcatggggttcgttaggaacgcccttggattggatcctcctccctctccagaagatcctactccggagaacagattccatccatgggatcagtctccctcagtggacttgcgtgaaagggccgccaagattagaacgctagcacactgccctgttaccggcaaagatattaactacacttgtcctctgtcaggaattccgactcatcactcacgagaggcttgggagatggataaagcatatcacgattctaaaaaatatgaaatcctgaaaaaagttaatatttatgagcatgacttaagaagcggtagacccttcccggagtttgattttccccaacagcaaggctacgacaaggccgttaacctaacaaactgggatttgtttttctacacaagatcattctattccatggatacagagttccaattagccgcagtcacaaagatgctaagctatccaattacgattgggtctttgctgcacaaattttccccgtattcattgaacccaaaggggcctatcaccttagaaggtctaaaatctctggctgctctcaggtatactttatatccgttggagaatagatctttaccaaccacaactaagaaccgtgctatgagaattttcatcctaggtgcacgtgctgaagctcaattgccgggccacgtttggaaacagctccagtttcttttcccagagcagagtttcgaaatacatttcattggacccgaatgcctgtataaaagggataaacaggagtacgtcaagtctactacgccggtagtacaaagagtagacgagactctgaaattcatttatcgtacaaactttttcgaagtattccatgaggctcaagattttttcccatacgatccatacatggatgtcttttttactttccatccaggctacgcatctccagaatctcacggttcatggatgggtgaaactatgaaggcattactggaaacaaaatgtgctatcttcacaacgggtttcaataagaaagacctaacggacgacataaatcttgtcaaatccaaatacggtaaggaaatggatgtcttaatggagcccgtcagaaacgtatttggaagtacgaagtgggaattaaatgacatgaatcctcaagaagtttatcaatttaacatgtatattgccgggttcagaggtaaaaggtaccatacaatcaagagacaatgattatcgggaggccatgcccaactttcatcttataaatatatgcgttttctaccgttattataatttttttcttatgtatgatatctcaatatctgta

SEQ ID NO: 2022 - DNA, 910 bp, Saccharomyces cerevisiae
tcaccccaatttggaaagagataacagagtctttaccacattataaatcatgctttgtcgcaatactgccagaacgggctgtaaattctttcgtttatatcattcgaaccctatcgaacatgttaaaccaattcatattaaacctttaacttatggaaaagaatcaccccagtataaagtattgtcactagctctacaaaagtttgttcccgagcacggtttctctgaaagatccattgttgaatctttaaatgagctcggctatccttcctccatgatctcttcaataggtgctcccaactcgccctcgtttttccattcttccaccgctgtcatggaactgataaagtttcaattggtagataaaaggtatcgtttaactgaaggaatcaaccctgacgtaactccacaatacaaactaccctcattagaacatttgctgttaaaaagattggagatggacaagccaatcggtgggcatttgtcggaactaatgtcacaattggctattccaagcgcctttctctttgaaactgcaattcctgaactacacagattgtccgatgatatgatttacttttccaacgaaaaggaccaccatgattctgcatggtatgctaagagattggctgtttcgagcacctacattggttcaaagttatttatggctcaggataaatcccacaattacaaagaaacgtttacttttgcaaaggataaattacatagggtcatgcgtttgggtgagtactataacaatactgaagagtttgcctggtatacgttaatgtctacggtaaatttaatcaaatctcaattagttaggggttaagcaatcttacatgtcaatttgaagtttaggacagtgaaatgcgtaggtattttgtttgtaagttacataattgtatat

SEQ ID NO: 2023 - DNA, 1032 bp, Saccharomyces cerevisiae
gatatcatcgcactacagtaaaattttcatttatagcgatgctttttaaacaatggaatgacttaccagaaccaaaacatctgctagatctcccagagatttcaaaaaacctgcaatctttagaagtctgcccggttccaaaagttgagtttcctcaggacttggatgttcctcaatattcgacagccgtcattactactaagataatgaacccattattccccaaaaatctgcttcaattaacctctattggtgaaattaaaactacattgacggtgaaaagtccaagtcttccccaatcttcaggtaaacactcgtggaattacgacgaaaactttccaaacgaggttgatcctgatcaaaaaaatgacaccgccgatgaaacagtatatggtttttctttcccgatttattcatttggaaagacgttattattttctatggaggagaatttcattagtatatcgccgatttttggtaacatgataagtagatctatcatatcacagttagcccagttctcccctgatataatagtaattggcacctctgataaaatcgccagcatgaaggtaatgacggaaaatgaatgtacactacaaccaccagaatttataacgggattcataggaagtgtgctaacacaattgattgtcggtcccagtaagggactgaaatttaaatgtcttgtagcgcctagtgaggggcctaatggatttgagaaactttcgttgtctgacatgggttctttagttgatttgtgcggtcaatggcttggttttgagccttcaagatattctgaagaatgctatcgcttatggaggtgtgatagcgcggcaattggtgcacaatcaggcctatatatatgaatggcgatcacagaatgtcagtaatggcgagtgaaagaggcataagagggtacttaagctcaaaataacatatgacttttttatttaataatatttctaaatatacaatatacagcttccaaatcctaaagaagaatattagaagggaataaaagataatata

SEQ ID NO: 2024 - DNA, 1666 bp, Saccharomyces cerevisiae
agtaaacgtatttatagaatgtcagaagaggataaagcgaaaaaattagagaatttattgaagttattacagttgaataatgacgatacttcaaaattcactcaagaacagaaaaaagctatgaaagaccacaaattctggagaacgcaaccggtcaaagatttcgatgaaaaggtggtggaagaaggccccattgataagccaaagacaccggaagatatatctgacaagccactacctttattgtctagcttcgaatggtgtagtattgatgtggacaacaaaaaacagcttgaagatgttttcgttctactaaatgaaaactacgtggaagaccgcgatgcaggcttcagatttaactataccaaagaattcttcaattgggctttaaagagtccaggttggaagaaggattggcatattggtgttcgcgttaaagaaacacagaaattagttgcctttatctcagccataccagtaacacttggtgttagaggtaaacaagtgcctagtgtagaaatcaatttcttgtgcgttcacaaacagctaagatcgaagagattaacacctgttctaattaaagaaattacgagacgagtgaacaaatgtgacatctggcatgcattgtacacggcaggtattgttttgccagcacctgtgagtacgtgtcgttatactcatcgtcccttgaattggaagaaactttatgaagtagatttcacagggttaccagatgggcacacagaggaggatatgattgctgagaatgcgttaccggccaaaacaaagacagcgggattgagaaaattaaagaaggaagatattgaccaagtttttgagttgttcaaaagatatcaatccaggttcgaactaattcaaattttcacaaaagaagaattcgaacataatttcattggtgaagaatcgttaccattggataaacaagtaattttctcatatgtagtcgaacagcccgatggaaaaattacagacttcttctcattttactcattgccattcacaatcctaaataacacaaaatataaggacctaggcatcgggtacttgtattattatgccaccgatgcagatttccaattcaaagacaggtttgatccaaaagctactaaggctttgaaaacaagattgtgtgaattgatttatgacgcttgtattttggccaaaaacgctaatatggatgtttttaacgcgttgacttcgcaagataatacattgttcttggatgatttgaagttcgggcccggtgacgggttcttgaacttctatttatttaattatagagcaaagccgattaccggtggcttgaatcccgacaatagtaacgacattaaaaggcgtagcaatgtcggtgttgttatgttgtagtggctgaaaggacgaggcgtatatagttttcgtgtacatagccgacagaatttgaccacatttagtttttccgcatagtcaattgacgaagtgaaaaaataattaatccaatggctggctttagagtgtcagcctccaaaataaatccaaaaatagacaaagagaatcactataattaccgccttggagtccaagttggcttgagaactcgcatttatttttagcgactgaggtagctgaaaaacgcctactttctcagaaggcggtagtgagcatatat

SEQ ID NO: 2025 - DNA, 949 bp, Saccharomyces cerevisiae
aaaacgcctactttctcagaaggcggtagtgagcatatataagtatgtaagaaagatcaactcttctggactagatactcaccgatctagtgaaaatataaacaaacccaacatatatataaaatgaaggcctgttccatattatttaccaccttaattactctagccgctgctcaaaaagactctggttccttagatggccagaactctgaagatagctcacaaaaggaaagctcaaactctcaagagatcacacctaccacgacaaaggaagcccaagaaagcgcatcaactgtagtttctaccggaaaaagcttagtacaaactagcaacgtcgtcagcaacacctatgctgtggctccaagtaccaccgtagtgacgacggatgcacaaggcaaaaccacgacacagtacctatggtgggtggccgaaagcaactctgccgtaagcacaacttcaactgcctctgtgcagcccaccggagagacgtcaagcggaatcaccaactccgcatcctcctcaacgacatcaacatcaacggacgggccagttactatagtaactaccacgaattcgttaggtgagacttacacatctactgtttggtggctaccgtcctcagccacaactgacaacacggcttcatcaagtaaatcatcttcgggatcctcatcaaaaccggaatcaagcaccaaggtagtaagcactatcaaatcaacttataccactacgtcaggttctacagtagagacactgaccactacatacaagtctacagtcaacggtaaggtagcgtccgtaatgtccaattctaccaatggcgcctttgccggcactcacatagcttatggtgcgggtgcattcgccgttggtgcccttttgttatagaatgtataatcagttctgtataccaccacatagttctgcattttaataaaactctttcttt

SEQ ID NO: 2026 - DNA, 747 bp, Saccharomyces cerevisiae
aataagtattgtctggcttctgagacggcggtaagatatccttaagagttgcaatggtccttttacacaaaagcacacatatatttcctaccgattttgcctctgtttcacgcgccttttttaatagataccccaatccatactccccccatgtactatccatagacacaatatcaaggaacgttgatcaagaaggaaatttgcgcacaacgaggctgttgaaaaagtccggaaagctgcccacatgggtcaaaccctttttaagaggtataacagaaacatggataatcgaagtttccgtagtgaaccccgctaactccacaatgaaaacttacactaggaatctggatcacactggaatcatgaaggttgaagaatatactacctatcaatttgacagtgctacaagtagtacgatagcagacagccgggtgaagttttcaagtggcttcaatatgggtatcaaatctaaggtagaggattggtcgcgcactaaatttgacgaaaacgttaagaaaagcagaatgggcatggcatttgttatccaaaaactcgaagaggcgagaaatcctcagttttgatgttcccatttaaagatctttaaagatatcaccatgggcgagcgaaattgagaaaactagtgcagctcgcatttggtcacgtcctaaaaattgtaaataagcgctggttcaacaaaatttaatatacacacatatataattatttatttataacagtcattctgct

SEQ ID NO: 2027 - DNA, 1074 bp, Saccharomyces cerevisiae
ttttgagttccttgtaactattctatcctaaccaccacctcaaaaaaaaaaaagtaataaaaatgtcttgggacgacgaagctatcaatggttctatgggtaatgatgacgccgttttgatggactcatgggatgctgaaattggtgatgacgaacctgtcatgcaatcatgggatgcagaagaggaagaaaagaagcctgccccaaagccaaaaaaagaacaaccaaaaaaggttaaaaaagggaaagaatcctccgctgacagagccctattggatattgacacattggatgaaaagacacgtaaagaattaatcaaaaaggctgaaatggagtctgacttaaacaatgctgcagatttgtttgcgggtttaggtgttgccgaagaacatccaagggctcgtgctttacaaaaggaacaagaggaacaagctctaaaaagacccgcctttaccaaggacacacctatcgaaacacatcctttgtttaacgccgaaacaaagagagagtaccaggatttaagaaaggctcttactgctgctattacaccaatgaacaaaaaatctccgctgaactactcctcatcgttagcgattgatttgattagagatgtagcaaaaccaatgtccatcgaatctataagacaaacagttgctactttgaacgttttgatcaaagataaggaaagagaggagaggcaagctcgtctggcccgtgttagaggtggtactgctactgggggtgctggtaagaagaaagtcaaaggtaagaccaatttgggtggcgcatttaagaaagatcaagatttcgacctagatggccccgacgattttgaattcggtgatgacgactttatgtaatctgcttattgtttctttgctatgataaacttgtccatctcattttgttggtgaaaaaaagcgaagcccagcaccgcaggccttggatattgccatatcacaattgtcctgaaattgtgaatgtctatattcccatatatatatccataggcgtttcattcatataaaaataaatacgcatatgtgtacgtaggagattgtgttttcaagatgg

SEQ ID NO: 2028 - DNA, 1684 bp, Saccharomyces cerevisiae
tatacatctgccacgacacatcaaagattaataatcacaagaaggcatgagctcgcaatttccttcgtccccctacaggacagtggatccgtactctccaccaaattacaaacagcagcctaattgtccctcatccaattatgagaaagctggtaaaactgcgtcagaatcaattggaaatttcgggaaaggagattatccaactccatttccttcttccagtataggaagggtttcgtctcccgttaggtcgaataaggttgacgccatcccttcctctccagcttttcctggccagttggcagaaacgtcacccaagttttcttccaaactttcttctccttcaaggcatactagagtcatcaatgctgaactagatcctagcaagatcagcaccattactgtagggcgcaatagttcgcaatgtgatgttgcgctctgtaagaataagttcatatccagagtacacgctagtataacttatttaccacaaacaaatgaagtgaagattcactgcttcagtatgaacggattaatcgttacctatcgtaagcaatttgattgttatcaattaaaggataccatgaataacaataatagggcatataggcttgttcccagattctctaacgaaaaatgtgttaaagaaattcaagacgagggaggattcattaatttcactctggaagagggagacaccgtttatatgacatattacaagggtatcatgttggattttaggcaggttttacttcgcatttcgttaaaagaaaaaaactcttcttcagagccgttaagattcgagaagaaagctgaatttgaaagtgaaagtgaaacgaaacatatgggtagtataaggaagcatccattgatttttactgacacttcgatggacagacccaaaaaaatacttaaggatagcaacaaaatctcaattggtagtgattctggcgttgcagaaaggatgctaaaccacttcctaaattctaaatcgtccccactttcatccgtctcctctgttgatcacgaggaacaaaccctgagacaagattcactatcatctgataaaaatcctatgactatgaagaaaccaaaacttaacaagagggtcttaccttcaaagccaaaaaaatcggtgaaagagaatttggatgagctatctagaagaaatattgatgttatgcatctacagcatattttaaccaatcacctagcttttgcaaacgtccagcagacgccattattccaattacagcaggtgaactcacaaatttctgagctttcaagagatgaattacgttcgattttgagcgacgcgaaatgtgtcggtgtcatttaccgtcatggtaaggacgccgccggcaaaccattggacgaagagtatttctacgatttagaaaacgatgatgattacgagagaagaaacttggtgagttcattaaaaggtggaaggacaggcttaagatcttgtagaaggacacataaacaatatttttggaaaaagccagcaaaatagaacattttattccatcggatatatgataagaacaagaaaataaaacatcaagtgcctatatatcccatctgagtacgtaaaaattttgtaagaatacagttatgtagtaaaataaaagtaaataaagcgctaaaacaaaaaaataacttcaaataaagtcataaaagt

SEQ ID NO: 2029 - DNA, 705 bp, Saccharomyces cerevisiae
acccatccgagtacttagtaatagaaatatatattatgtctagtgccatcgttgctaaactgaacaaagaggacatcattaaggacaccgtcaaggacttggcgttcgagattcttggtgagttgtcggtttcgtacgttgattctgacgacatcaaattgggcaatcccatgccaatggaagctacgcaagccgctcctaccatcaagttcacgcccttcgataaaagccaattgtcagccgaggataaactcgctttgttgatgactgacccggacgcgccctctagaacagaacataagtggtcggaggtttgtcactacatcatcactgatattcctgtcgagtacggacctgggggagatattgccatttcggggaagggtgtcgtgagaaataactatattgggcctggtccaccaaagaactccggttatcacagatacgtgttcttcctgtgcaagcaacccaagggagcggattcgtccacttttaccaaggttgagaacattatctcctgggggtacggtactcctggtgcgggtgcctatgactatatcaaggagaacaatctgcaactggtcggtgccaattattacatggtcgaaaacacgaccgttgatttcaactatgacatgtaaggtgcagcaaccggctcgtatagatacggataagatagagtatattgtgcaaacgcgtatatga

SEQ ID NO: 2030 - DNA, 792 bp, Saccharomyces cerevisiae
tccttttccctaccagtgcatcaatacaagaacaagagaacaagcaaaaaacatgaaccaagcaatagacttcgcacaagcaagcattgactcctacaagaagcacggcattctggaggatgtaattcatgacacaagctttcaaccctccgggatacttgccgtagagtactcatcaagtgcacctgttgccatgggtaacacgctgcccactgagaaggcacgttccaagccccaattccagttcacgttcaataagcaaatgcaaaaaagcgtaccacaggcgaatgcgtacgttccccaagacgacgatttgttcacactggtaatgaccgatccggatgctccctctaagacagatcacaagtggtctgaattctgccacttggtagaatgcgacttaaagctgttgaatgaggctactcacgagacctccggagcaaccgaattttttgcatcagagttcaatacgaagggctcgaacacactaatagaatatatgggaccagctccacccaagggatccggtccccacagatatgttttcttgttatataagcagcctaagggcgtggactcatctaagttctcgaaaattaaggatagaccgaactggggttacggcacccctgccaccggtgttggcaaatgggctaaggaaaacaacctgcaactagttgcctccaatttcttctatgcggaaacgaaataggtatatatatatatatatgtatatgtatttattttttagatttcagtgcttttcacttgactttttattatttttgtttt

SEQ ID NO: 2031 - DNA, 975 bp, Saccharomyces cerevisiae
agagtgaataaaggacagtgagaaaaatgctttatttgatcggacttggtctctcgtacaaatcagacattaccgttcgtggtttggaagctattaagaaatgttctagagtttatctagaacactataccagtatcctaatggctgcaagccaagaagagttagaatcttactatggtaaagagatcatcttggctgatagggaattagttgagactggttctaagcagatcctaaataacgccgataaggaagacgttgctttcttggtcgtgggcgatccatttggtgccaccacacacacagatttagttctcagagctaaacgtgaggcaattcccgtcgaaattattcataatgcgtccgttatgaatgcagttggggcatgtggcctacaactatacaatttcggtcaaaccgtttccatggttttctttaccgataattggagaccagactcatggtacgacaagatctgggaaaatagaaaaattggccttcatactttagtgttattggacatcaaagttaaggaacaaagcattgaaaatatggcccgtggcagactaatctacgaaccaccaagatacatgtctatcgctcaatgttgtgaacaattattagaaattgaagagaaaagaggtacaaaggcatacactcctgatactccagcagtcgcaattagtagattaggctcgagctcccaaagctttaagtctggtaccataagtgagttagccaattacgattcaggagagccacttcattcgcttgtcatcctcggcagacaatgtcatgaattggagctggaatacctgctagagtttgccgacgacaaagaaaagtttgggaaagatgtggcaaatgaccaagagtacttcaaacctgcggcatgggtcccacccacagaagacgacagcgacgagtaaaggtaatgcacacgctcatgtgtagtttcttttttataatgtatat

SEQ ID NO: 2032 - DNA, 708 bp, Saccharomyces cerevisiae
atgacgcaattaaaatatttgttgctggtttctaggcaaggaaaaatcagattaaagaaatggtacacggcaatgtccgctggtgaaaaggcaaaaattgtgaaagacttgacacctacgatattagcaagaaaacccaaaatgtgtaacatcatcgagtataatgaccacaaagtagtatacaagcgatatgctagtctatattttattgttgggatgacgcccgatgttgacaatgaactgctgaccttggaaattatccatcggtttgtcgaaacaatggacacatatttcggcaatgtttgtgagctagacattatatttaacttcagtaaggtctacgatatcttgaatgagatgattatgtgcgatggctccatcgcagagagcagtaggaaggaagtactgcaccatgtgaccgtgatggacaccatggagagcaacgataatcttgaaagggtattgagttaggaccactaaaaaacaatggaatgaagaagaaaggagaagaataagatgagaagggggcaaggggccctactattattaccgtctgtcgcaaaagccgttgcccggacaaaaatatcttttgcgagcatcggcacaacgttgattggtcagagcggtaaaaaggaatgaatgtgaaaaatgtaaagaatatataggcgataaaattatcatgcgaagtgatgtacatatttttgaatt

SEQ ID NO: 2033 - DNA, 1569 bp, Saccharomyces cerevisiae
ttgctctcaggcatcaaactagtgcgcaaagtgataggtgatcatacaatgttttcaagaacagcatccaagttccgtaatacacggaggcttttaagtacaatttcctcacaaattccaggaaccagaacctctaaacttcctaatgggttgacaattgccacagagtacatccccaacacatcttcggctactgttggaatatttgtcgatgctggttctagggcagaaaacgtaaaaaacaatggtacagcgcattttctagaacacttggctttcaagggtactcagaataggtcacaacaaggaattgaattggaaattgaaaatatcggatctcatttgaatgcatatacatcaagagaaaacacagtttattatgctaagtccctacaagaagatatcccaaaggctgttgatattctaagtgatattttgactaagtcagttttagataatagtgctattgagagagaaagggatgtcatcatcagagaaagtgaagaggtggacaagatgtatgatgaagttgtttttgaccatcttcatgagattacgtataaggaccaacctttaggaagaaccattctgggtcctataaaaaacataaaatcaataacaagaactgatttgaaagactatataaccaagaactataaaggcgacagaatggtattggcaggtgcgggcgctgttgatcatgaaaaattggtacagtatgctcaaaaatactttggccatgtgcccaaatctgaatcgcctgtcccgttgggatcaccaaggggcccattaccagttttttgtagaggtgaaaggtttatcaaagaaaacacgttacctacaacacatattgctatcgcattagaaggcgtgtcatggtctgcacctgattattttgtagctctggcaacacaagcgattgttggtaactgggacagagccattggcacaggtacaaactccccctctccattagctgttgcagcaagtcaaaatggttctttggctaattcttatatgtcattttccacctcttacgctgattcaggtctgtggggaatgtacatagtaactgattctaatgagcataacgtgcagttaattgttaatgagatcctgaaagagtggaagagaataaaatctggcaaaatatcggatgcagaggtgaatagggcaaaagctcagctaaaggcagctctgttgctatcgttggatggatcgacagccattgtagaagatataggcagacaagtggtgaccacaggtaaaagattatcaccagaagaagttttcgagcaggttgataaaatcactaaggatgatattattatgtgggcaaattacagattacaaaacaaaccagtttcaatggttgccctaggaaatacatccactgtccctaatgtatcctatatcgaagaaaaactgaaccaatgaccacgccgatttattagtaagttcatttcacatctctgctaatttctaatttctcttcatacttgtataaagttctatgtcaataaattcttgttcaaatgagatgttgctacataaaaaatatgaatagat

SEQ ID NO: 2034 - DNA, 450 bp, Saccharomyces cerevisiae
aaaaccatcaaggcccgaaaatacaagtgtgtactaatacagtaagtaggtcaaatacgcaatgaccaaagatgccgtgaatctagatgcttacaccgtgagcttcatgcctttctataccgagtatcaaggaccaaccgaagagtttaaggattacaaattcgaagatactatttactttcgtggcaaggaactgaagagggaaaagtctgcgacgccttccagtagcgataacacaactagtaataccttcagtaatggcgccatcctctcgggaaacacaataactggcaagatagtttcagtgaataattacgaaagagagggcactgatcgcaacgaattggcgcgattgcaagaattgatctccctcatcgatgtcataaatcagtaaatataaacattaaatacattacacgtagccacccgctgtatagcataaaactaact

SEQ ID NO: 2035 - DNA, 2344 bp, Saccharomyces cerevisiae
agtgattgttatacacaaacagaatacaggaaagtaaatcaatacaataataaaatatgacaatcaaggaacataaagtagtttatgaagctcacaacgtaaaggctcttaaggctcctcaacatttttacaacagccaacccggcaagggttacgttactgatatgcaacattatcaagaaatgtatcaacaatctatcaatgagccagaaaaattctttgataagatggctaaggaatacttgcattgggatgctccatacaccaaagttcaatctggttcattgaacaatggtgatgttgcatggtttttgaacggtaaattgaatgcatcatacaattgtgttgacagacatgcctttgctaatcccgacaagccagctttgatctatgaagctgatgacgaatccgacaacaaaatcatcacatttggtgaattactcagaaaagtttcccaaatcgctggtgtcttaaaaagctggggcgttaagaaaggtgacacagtggctatctatttgccaatgattccagaagcggtcattgctatgttggctgtggctcgtattggtgctattcactctgttgtctttgctgggttctccgctggttcgttgaaagatcgtgtcgttgacgctaattctaaagtggtcatcacttgtgatgaaggtaaaagaggtggtaagaccatcaacactaaaaaaattgttgacgaaggtttgaacggagtcgatttggtttcccgtatcttggttttccaaagaactggtactgaaggtattccaatgaaggccggtagagattactggtggcatgaggaggccgctaagcagagaacttacctacctcctgtttcatgtgacgctgaagatcctctatttttattatacacttccggttccactggttctccaaagggtgtcgttcacactacaggtggttatttattaggtgccgctttaacaactagatacgtttttgatattcacccagaagatgttctcttcactgccggtgacgtcggctggatcacgggtcacacctatgctctatatggtccattaaccttgggtaccgcctcaataattttcgaatccactcctgcctacccagattatggtagatattggagaattatccaacgtcacaaggctacccatttctatgtggctccaactgctttaagattaatcaaacgtgtaggtgaagccgaaattgccaaatatgacacttcctcattacgtgtcttgggttccgtcggtgaaccaatctctccagacttatgggaatggtatcatgaaaaagtgggtaacaaaaactgtgtcatttgtgacactatgtggcaaacagagtctggttctcatttaattgctcctttggcaggtgctgtcccaacaaaacctggttctgctaccgtgccattctttggtattaacgcttgtatcattgaccctgttacaggtgtggaattagaaggtaatgatgtcgaaggtgtccttgccgttaaatcaccatggccatcaatggctagatctgtttggaaccaccacgaccgttacatggatacttacttgaaaccttatcctggtcactatttcacaggtgatggtgctggtagagatcatgatggttactactggatcaggggtagagttgacgacgttgtaaatgtttccggtcatagattatccacatcagaaattgaagcatctatctcaaatcacgaaaacgtctcggaagctgctgttgtcggtattccagatgaattgaccggtcaaaccgtcgttgcatatgtttccctaaaagatggttatctacaaaacaacgctactgaaggtgatgcagaacacatcacaccagataatttacgtagagaattgatcttacaagttaggggtgagattggtcctttcgcctcaccaaaaaccattattctagttagagatctaccaagaacaaggtcaggaaagattatgagaagagttctaagaaaggttgcttctaacgaagccgaacagctaggtgacctaactactttggccaacccagaagttgtacctgccatcatttctgctgtagagaaccaatttttctctcaaaaaaagaaataacttaaatgagaaaaatttcgtaatgagataaaatttcgctccttttctgttttctattttctattttcccaacttttgctctattcagttataaattactatttatccatcagttaaaaaacaagatcttttactggtcagctaggaaagcgaaaatacaaagactttatgcacttagtgatatatatgtatagatatatccatttttacgcacttatcatatatcttagttatct

SEQ ID NO: 2036 - DNA, 417 bp, Saccharomyces cerevisiae
acgtatcagaaacaatgactatgaatggaataccagtgaaattattaaatgaggcacagggacatatcgtttctctggagctaacaacgggagcgacttatcgtggtaaacttgttgaaagcgaagatagcatgaacgtacagctaagagatgtaatagctacagagccccagggggctgtaacacacatggatcaaatattcgtacgtgggtcacagatcaaatttatcgttgttccagatctcttaaagaatgcaccattattcaaaaaaaactcatcaagacctatgccaccaataagaggacctaagagaaggtgataataggaaacgtgacggcagaaacgcattcatcattgtagggggaatatatatatatattaatattgtttatgtaaaatatatttgaatataaatt

SEQ ID NO: 2037 - DNA, 996 bp, Saccharomyces cerevisiae
ggcaggataaagtgacagattcagttatacattatggttaataattcacagcatccttacatcaaagatggatggtttagagagattaatgataaaagttttccgggccaggcctttactatgaccgtggactcaatactttatgaagcccgcagtgaatttcaggacatcttaatcttccgtaacaaggtatacggtactgttttggtcctcgatggtattgtccaatgtacggaatttgatgagtttgcctatcaagagatgatcacccacattgccatgtttgcgcattctaatcccaagcgtgtacttatcattggcggtggggacggaggtgtcttaagggaagtagccaagcacagctgtgtagaagatatcactatggtagaaattgactcatcagtgatcgaattatcccgtaagttcttgcccacattgagtaatggtgctttcgatgacgaaaggttggacttgaaactttgcgatggcttcaagttcttacaagatataggtgcttccgacgtccataagaaatttgacgtcattattacagatagttctgatcctgaaggtccagctgaagcgttttttcaagagaggtatttcgaactattgaaagatgctttaaatcctaatggcgttgttattatgcaaagctctgaaaatttttggttaaatttaaaatacttacatgatttgaaaaatacagccaaaaaggtatttcctaatacagaatattgctataccatggttccaacctatacatctggccaattaggtttaattgtttgcagtaataacgccaatataccgttgaacattccgcaaagaaagatatctgagcaagaacaagggaagctgaagtactataatcctcaaatacattctagtgcgtttgttttgcctacttgggcagacaaggtcattaatgaatgatttattagcattgatattattattttaaaaagtctatttacttgtatatttatccgaata

SEQ ID NO: 2038 - DNA, 2400 bp, Saccharomyces cerevisiae
taaaaagatgtgttacagtaggcaagccattcctccacctgttcctaatagacctggcggtactaccaatagaggacctcctcccttaccacctcgcgcaaatgttcagccaccagtttgttcttctgagaactccagtaaacctcgagaaaatagggtggcaggtgaatcactgcgcacaccaagcagttctaaccctttagctgacagccaggtgaatagtgacaatatttttcaatcacctgtcctttctaacttaaaagctcctccttccgtcttcaacaaagttcaacacccggtaccaaagccgaatattgatgatcaatctgttgatccattggagacaaacaagttctacacaaacatgttattagacgataatacacaacctatatggacacatccttattcaatttggttttctcgtgatccagaattgtttggtttggccgccaatcatactttagcgtctcaaagggtttttgatacaactacaaatcctcccagattctacttcaatcccacaaatataaaatcatttgtattcaaggccagggaatttgtctcttcaaatgatatcaagcttgaattccgggatatgaaacatatgtccatgtgcttactaatgtctttgagtagttcccagtttatagaattcccgctggttcaggggatgggctttgtcacggctatttaccacgatttgggttttgaattaagaagcgccgttggtttcaggagcttagagcgcataagcgtgaatgaaagatatggtaaatataatatacaacttgagaataataggaattggatactttatttgacctcacctgattactcttttccacaagattttcaaatttcattactcgacagcaatacaataatatcatctcataaaatcaatggtcttatctgtcaattatctgcagactccgtccccagtattgacatggcagcgggctgttatccagtatactgtgacctatcagggcaaactgttgatgaacatttcacaaattacagatttaactatacggttgcaggctactcgcagtctggaactactctaatgtatgctttaccacatcataaagcggcattcacaccagaaatgcaggaacgtgaaattgcctcaagcctggattccacagttaaaggcttaatgactggttatctcacaaacagttttgatatgcaggttcaagtacctcaagaattgggctttgaacctgtcgcgttatctttgaataagaaggcagattacagtcaagaaaagctatctaaaattcgggaagctgctgttcaagaagttcaattgagtgaccctcaacaagaatcaaacatagattctatgtatttctctggtaagatacttgcaaagtatgcgtggattctttatgtgacacattacatccttcatgatgaaaatttaacaaaagaattattatctaaactgactattgcaatggagagattcatcagcaatcagcaagtcttacctttaaattacgacgttagttggaaaggcataatttcatcaggctcttctagccaagactttggtaactcttattataatgatcatcattttcattactcttatcatgtcataacggctgccattatctctttagtcgattctgatttaagtggagttactaacaactcctggttagaaaataatagagattgggttgagtgcttaattagagattactctggtgttgacaacgatgatccgtacttccctcaatttaggtcatttgattggtttaatggccattcatgggccaaaggactatttccaagtggtgacggtaaagatgaagaatctacttcagaagatgtcaattcttgctatgcgataaaattgtgggggttggtaactggaaattctaagttaactgacatagcgaacttacaactcggcatcatgagaaatgttttccagagctacttcctatacgaaagcaataatactgtccaaccgaaagaatttattggtaataaagttagtggtattttattcgaaaataaaattgatcacgccacgtattttggcatggagcctcaatacattcatatgattcacgccattcctataacatcagcatcttcatgggtcagaacaccaaattttgtcaaagaggagtgggaagaaaaaatgcagccgataattgatcaagtgaatgacggttggaaaggaataatcatgttaaatatggctctgcttgatccaaaattttcgtacgactttttcagccaacctgatttcaacagaaatttcctagacaatgggcaaagcttaacttggtctttagcttattcaggtgctttttcttaggggtcagaaatatatacagtgttagtagcatggtacaagtgttacgataaggt

SEQ ID NO: 2039 - DNA, 1457 bp, Saccharomyces cerevisiae
tatatatgatgatactgtttattgaatcatacaccctgttggttagaccggaagaaagctaaagttgatctccgaaaatacaacggtgcatcaaccaaagaaaacattgcaggcgtttccaagtgacactgcatattcgaaagtatggttgatcttatagcgagggatgactccgtagatacttgccaagcttctaacggctacaatgggcacgcaggtcttagaattctggcagtattcattatactgatatcgtcaggattgggagtttatttcccaattttgtcatcacggtattcgtttataaggctaccaaattggtgctttttcatagcgaagttcttcggttctggtgtcattgttgccacagcgttcgttcatcttctacagcccgcagccgaagctctgggagatgaatgtcttggtggcacatttgccgaatatccatgggcttttgggatctgtttaatgtcgcttttcttacttttcttcactgaaatcatcacgcattattttgtagcgaaaacgctgggacacgatcatggggaccatggggaagttaccagtattgatgttgatgctcccagttcgggatttgtcatcagaaatatggactcggatcctgtatctttcaataacgaagctgcctactccatccataatgacaaaactccgtacactactagaaatgaagagattgtcgctactcctataaaggaaaaagaacccggctcaaatgttactaattatgatctggaaccgggaaaaacagagtcactagctaatgaactagttccaaccagttcccatgcgacaaatctcgcttctgtacctggaaaagatcattattctcacgaaaatgaccatcaagatgtctcccagttggccacacgtatcgaggaggaagataaagagcagtatctcaatcagatactagctgtttttattctagaatttggcatcatctttcactctgtatttgtgggtctttcgctatctgtcgcgggtgaagaattcgaaaccttatttatcgttttaactttccaccaaatgttcgaaggtttgggtctaggcacaagagttgccgaaacgaattggccagaaagtaagaagtacatgccttggttaatgggattagccttcactttaacgtcacccatagcagtcgcggtaggtattggtgtcagacactcttggatacctggctctagaagagcattaattgctaatggtgtttttgactcgatatcatcaggaattcttatttatactggactagtcgaattaatggctcatgaattcttatactctaatcaattcaaaggacctgatggcctcaaaaaaatgcttagtgcatatctcatcatgtgttgtggagctgctttaatggctcttctagggaaatgggcatagtatctcacgtatattttgttagattagatagttattcattatca

SEQ ID NO: 2040 - DNA, 880 bp, Saccharomyces cerevisiae
taccgctatagctctgaaaattatgcattaacatatattagaattgaattatatcaaaaaaatactaagaaaacatcataatgacagtaaaaaaaatagctattctttatacagatgaagataacgaatggagtaaaccatggggcaattttgttgatatggctatcaagctattagaacagaccaggaaattggaatgtatcgcagaagatgtcgaatatgaagtgttccacgtacaaaaaaacgtgttccctcaattgtcagatcttcagaaagatgagtatttaggcatatacatcactggttcaaaatatgattcatttgataatgaaattgaatggattatgaaattaagaagtttcttaaatgagatgctaactagcaagactgaatatccgcccgtagctggaatatgttttggtcatcaagttatcgcggctgctctaggaagttcagttggacggaatccgaaagggtttgaaggtggggttgtgtcactaaaactgaactctgtgggtcaaaagttatttggtgctcaagaattaaatctttctgaagtgcacagtgactgcgtgttcgatgtcccagagggataccaaaattgggcgtcaagtgaaaaatgtcaaaaccaaggattttacaggcaaaacagagtgctgacgtttcaaggacaccctgaattcaatagtgatgtcgctcagaaggggcttttgaagtctcaagacaagcttacccttgaagagtttaatagatacgaaagacagtgccaggagctggataacaatggcatacaagctgccaggaatatttggaggttattcttgcaaaaaatatgaaacagctgcttgggttatatagtcgatagaggacgtataggaaa

SEQ ID NO: 2041 - DNA, 1829 bp, Saccharomyces cerevisiae
ttaaaaatagcgaagaacttagaactataagcctcaaaaggaaacttgtgtggtcgaaggctggacgccataataatatatatatgtacgtatatatattatatatgaatatctgtagccgctaacttgtgtgtttgtgaatttatataggataaatagagcaaaattactcggcattgaaaaatgaaacttcaattggcggcagtggctacattagcagtcttaactagtccggcattcggtagagtacttcccgatgggaaatacgtcaagattcccttcacaaaaaaaaagaacggcgacaatggtgaactcagcaagagatcgaacggccatgaaaaatttgtactagctaacgagcaaagcttttattctgttgagctagccattggtacaccttcacaaaacctcactgtgctgttagacacaggctcagctgacttatgggttcctggcaagggaaacccctactgcggttctgtgatggactgtgaccagtatggcgtgttcgacaagaccaagtcgtccacgttcaaagccaacaagtcctcgcctttttatgccgcttacggtgacggaacctatgcagaaggtgcatttggtcaagataaattaaagtacaacgaattagacctcagtggtctatcgtttgccgtggccaacgaatctaactcaacctttggtgtgctcgggatcggcctttccacgcttgaagtcacctattctggaaaagtcgctattatggacaagagaagctacgagtatgataactttcccctgttcctaaaacattctggagccatcgatgcaaccgcatactctcttttcctaaatgacgagtcacagtcctccggcagcatcctcttcggcgctgtagatcacagcaagtacgagggccaactgtacactatcccgttggttaatctttataagtcgcagggttatcagcacccggtggcgttcgatgtcactttacagggcttaggactgcaaaccgacaagcgcaacatcacattgaccaccaccaagctcccagccctactcgattcaggcacaacgctaacatatctgccctcccaggcagtggctttgctagcaaagagcttgaatgcctcgtattccaagacattgggttattatgagtacacgtgtccctcgagcgacaacaaaaccagcgtggccttcgacttcggtggcttccgtatcaacgctcctctatccgactttactatgcagaccagtgtggggacctgtgtcttggcaataattccacaagcgggcaacgccaccgctatccttggtgattccttcttgagaaacgcctacgtggtctacgatttggataactacgagatttccctagctcaagccaagtatggcacggggaaagagaacgtcgaagtcatcaaatctaccgttcccagtgcaataagggcccccagttacaacaacacttggtctaactacgcctccgccacgtccggtggtaatatttttaccaccgtgcgcactttcaatggcaccagtactgccaccactacgaggtcaaccaccaccaagaagacaaactctaccactactgcaaagtcgactcataaaagcaagagggcactccagagggctgctaccaactccgcttccagtatacgctctaccttgggtttactgctagtcccctccttactcatcctttccgttttcttttcgtaaaaaaaaacaatagacactatatatagacactttttcctttccttctttgcgcgatttcaagaggaaaagcatacttaaataagaatattcctaaaacacacgttctgacgcgtcaatta

SEQ ID NO: 2042 - DNA, 2181 bp, Saccharomyces cerevisiae
cttttttccttctttttgcatttgttcctatttccgcaattggacggttattaagaagaacgcaattggcttttctgtatattaaaatacatagcgtaataaaaagataaggtgaacaccaagcatatagtataatattacctaccacatatgaaactgaaaactgtaagatctgcggtcctttcgtcactctttgcatcgcaggttctcggtaagataataccagcagcaaacaagcgcgacgacgactcgaattccaagttcgtcaagttgccctttcataagctttacggggactcgctagaaaatgtgggaagcgacaaaaaaccggaagtacgcctattgaagagggctgacggttatgaagaaattataattaccaaccagcaaagtttctattcggtggacttggaagtgggcacgccaccacagaacgtaacggtcctggtggacacaggctcctctgatctatggattatgggctcggataatccatactgttcttcgaacagtatgggtagtagccggagacgtgttattgacaaacgtgatgattcgtcaagcggcggatctttgattaatgatataaacccatttggctggttgacgggaacgggcagtgccattggccccactgctacgggcttaggaggcggttcaggtacggcaactcaatccgtgcctgcttcggaagccaccatggactgtcaacaatacgggacattttccacttcgggctcttctacatttagatcaaacaacacctatttcagtattagctacggtgatgggacttttgcctccggtacttttggtacggatgttttggatttaagcgacttgaacgttaccgggttgtcttttgccgttgccaatgaaacgaattctactatgggtgtgttaggtattggtttgcccgaattagaagtcacttattctggctctactgcgtctcatagtggaaaagcttataaatacgacaacttccccattgtattgaaaaattctggtgctatcaaaagcaacacatattctttgtatttgaacgactcggacgctatgcatggcaccattttgttcggagccgtggaccacagtaaatataccggcaccttatacacaatccccatcgtaaacactctgagtgctagtggatttagctctcccattcaatttgatgtcactattaatggtatcggtattagtgattctgggagtagtaacaagaccttgactaccactaaaatacctgctttgttggattccggtactactttgacttatttacctcaaacagtggtaagtatgatcgctactgaactaggtgcgcaatactcttccaggatagggtattacgtattggactgtccatctgatgatagtatggaaatagtgttcgattttggtggttttcacatcaatgcaccactttcgagttttatcttgagtactggcactacatgtcttttaggtattatcccaacgagtgatgacacaggtaccattttgggtgattcatttttgactaacgcgtacgtggtttatgatttggagaatcttgaaatatccatggcacaagctcgctataataccacaagcgaaaatatcgaaattattacatcctctgttccaagcgccgtaaaggcaccaggctatacaaacacttggtccacaagtgcatctattgttaccggtggtaacatatttactgtaaattcctcacaaactgcttcctttagcggtaacctgacgaccagtactgcatccgccacttctacatcaagtaaaagaaatgttggtgatcatatagttccatctttacccctcacattaatttctcttctttttgcattcatctgaaaaccgttgcacaaagtttagacattcacatctccaagccagttggagtttctggcggaaatcgttgctctcgcttgggcaaagtttttttttattattaattttttattgttacgttggcggtcttcatttttacttcacaatagtttatcttacccactaagaataggttaccatttattcacatttttttttctcattcctagtatactatttacctgggatatggcctataatcaaaggctttaatattctaataattcgtttggcatctagaataatctataaagtatagtctatatacgtacatattgataatgg

SEQ ID NO: 2043 - DNA, 800 bp, Saccharomyces cerevisiae
atacactatatttgcccatttgagcgctatcgaatatgaatggacttagagttgcagcaaaaattcagccagcacgccaaactatcatattcttgcatggattaggtgatacaggttcgggatggggatttttagctcagtatttacaacagagagaccctgccgctttccagcatactaattttgtttttcctaatgctccagagcttcatgtgacagcaaacggcggtgcattgatgcctgcttggtttgacatcttggaatgggatcctagtttttccaaagttgacagtgacggttttatgaattctttgaattccatagaaaagacggttaagcaagaaattgataaaggaattaaaccggagcagattattatcggaggtttctctcagggtgccgcattagctctcgcaacatcagttactttaccatggaaaatcggtggtatagtagctctgtcgggattttgttccatcccaggaattctgaaacaacataagaatggcattaatgtaaagacaccaatttttcatgggcatggtgacatggatccagtagttcctattggactaggtataaaggcaaaacagttctatcaagatagctgtgagatacaaaattatgaatttaaagtatacaaaggtatggcccattctacagttccagatgaattagaagacttggcttcatttatcaagaagagcttatcatcatagctcttttcctaatattgcgagttcaatttaaccgctattatacttggttaaataatttatatacatccgtaagacgcgata

SEQ ID NO: 2044 - DNA, 1134 bp, Saccharomyces cerevisiae
atgtctaaagggagggtcaatcagaagcgttacaagtatcctcttccaattcaccccgtagatgaccttccagagttaatccttcataatccgttatcttggctatattgggcataccgctattacaagagtacgaacgcactgaacgataaagtacatgtagattttataggagataccactcttcacatcacggttcaagatgacaagcaaatgctatatctttggaataatggattttttggcactggtcaatttagcaggagtgagcctacatggaaagctagaacagaggccagactgggtctcaatgatactcccctccacaatcggggaggaacaaagagtaatactgaaacggagatgactttagagaaggtcacacaacagaggagattacaaagattagagttcaagaaagaacgtgcgaagttagaaagagaattactagaattaagaaaaaaaggtggtcatatcgatgaggaaaacatcctccttgagaaacaacgagaatcattaagaaaatttaaactaaaacaaacagaagacgtgggcatcgttgcacaacagcaagacatttccgaatcaaatttaagagatgaagacaacaatcttcttgatgagaacggtgatcttttgccactagagtcactagaactaatgccagtggaagctatgtttttaacttttgcacttcctgttcttgacatatctcccgcgtgcctggcagggaaactgtttcaattcgatgccaaatataaagatattcactcctttgtcagatcatacgttatataccatcactacagatcacacggttggtgcgtaagatctggtataaaattcggctgcgattatttattatataagagagggccaccatttcaacacgctgaattttgtgttatgggtcttgaccacgacgtctctaaagattatacgtggtattctagcatagcccgtgttgtgggcggcgcaaagaagacgtttgtgttatgctacgtggagagactaatctcggaacaggaggcgatagcactatggaaatcaaacaactttactaaattgttcaatagttttcaagttggtgaagtattgtataagagatgggttcccggaagaaatagagactag

SEQ ID NO: 2045 - DNA, 1369 bp, Saccharomyces cerevisiae
cgtggagtagtagaagtatattcgcaggtctttctctcattgttcaggacatatacatacgtaagcgtagttttcttcagtagaatgtggacaaacactttcaaatggtgcagcaaaactgagaaggagaccactactgcagacgccaaggtgtgtgctagcgtgcagggcctgaaggccctgcagcagcaaattatggatagcaccactgtgcgtgggtccgttaataacacgatgactccaggcgggattaaccagtggcatttccacaataagcgtgcgaacaaagtgtgcacgcctacagtactaatccatggatacgctgcctcgtcgatggcgttctacaggacgtttgagaacctgtcagacaacattaaagatctatatgccatcgacttgccagccaatggtgcctcagaggcgccagcattgcaagtgaacaaaaccaagaagatcaagtctctcaggtttaagcatatagaagatgacgtagtaatccctgtgatagagaagcgccccccagcagaggacatcaagtcacacctggagcagtacgaaagctacttcgtagacaggatagagcaatggcggaaggataacaagcttcgcaaaataaacgtggtgggccattcattcggaggatatatttcattcaaatacgccctcaagtaccctgattccattgagaaactgtgtctcatatctcctcttggtgtggaaaacagtatacatgctatcacccacaaatgggagcccaacaccacctatccacttacgtttaccgacccatcgtcccgatattatacaagaaagctgaacgtaccgcggtttatctttgaaaaccagctaaacgttttgaagtggatgggacccataggctccaaattgtgctcgaactacatctccaccgcatacgtaaaagttccggatcagatatataaggactatcttttgcactcatttgtcgggaagaaccagacggtgcaaccacagacaatcaaggtgttcacccatttgtttgaaaggaatctgatcgctagagatccgataataaacaacgttcgttttttgaacccagcaacgcctgtcatgttcatgtatggcgagcacgattggatggataaatatgcgggctacttgactactgaatcaatgctaaaaaacaaggcaaaggctagctacgttgaagtccctgatgctggccataatcttttcctggacaacccgcagcactttgcctcttctttagtctcgttcctgtcaaagtaatgcctatatagagtagagaagaaaaatacaatatggaaaaccacgcatatatatatatatatatataaatacatacatatacataatacatcactttact

SEQ ID NO: 2046 - DNA, 1035 bp, Saccharomyces cerevisiae
atgatagtagattatgaaaaggaccctagggctaaagaggctattgctatttgggaaaaaggtgtactgaaagagaaggatgggtcaatgtcagatgctataaacttctatcgaagtgcattgaaaatccatgataatgtggaatcactgtacagaaaaaaaatacttgatgagtggatgctgcacaaaaaactatcgggattatcaatgactactgatgctccagatgaacaaaatgaaaccggtaaagatgacttatctgttgaagaaaatgctgaacttcaaccctgctggattctggaaatcttgcctgacgacattttactgagaattattaaaaaagttatattaatgtctggtgaatcttgggtgaatttgtcgatgacttgttccacctttagcaagctttgcttccacgattctgtgccatttaaaactttcgcgaagtacatatattctaagcaaatatacgacaaaatggcaatggatcttaacggaatcaccgatataaatacctttgaaaaggaaatatggcggggtgatgattatcgtatgttaagggaaaggccatatattaaattcgaaggtgtttacatcagtgtagtaaattatgtaagatacggttccaatgcagaaagttcgttatctcttttaaagccagttcacatgatcacctattacaggtatttcagattttatgagaacggccaatgtttgagattactttctacagatgaacctagcgctgtcgtgaagcacttctccaaagagaacaaacccaggcatagtcatatgtgttattggagcctcggatttgattatgattttggtcatttaaagataacaaggtcagatgaaaagtatacgtttatcgaagaattccaaatcaagaatcaaggcaataagagatatcaacggttgaaatggctaagttcaattgtagtggataaggaagggaatgcatctaactgttcgttgagaaatgagaaatcttttttcttctccagagtgaaatctttcaaggatcctggatga

SEQ ID NO: 2047 - DNA, 851 bp, Saccharomyces cerevisiae
aatttgaagaacagagtgaaaagcgacaatttattaagctgttagagcattggacttttatatttttaccaaatgaaacgctttaatgtaagttatgtggaagttataaaaaatggtgaaacaatatctagttgtttccagccgttccagaaaaacgaaaactatggtacaataacttcagcaaacgagcagataacgccggtcattttccataatttgatcatggatatggtattacccaaagtagttccgatcaaggggaacaaagttaccaagatgtcaatgaatctcatcgacggattcgattgtttctactccacggatgaccatgaccccaaaactgtgtacgtttgcttcacattagtagatatgcccaagattttgcccatcaggatactaagtgggctgcaggaatacgagtccaacgctacaaacgaacttttaagttcgcatgtaggtcaaatactagactctttccatgaagagctggtcgaataccgtaaccaaactttaaatagttctggaaatggccaatctagtaatgggaatggtcagaacactataagtgacatcggggatgccaccgaagaccaaataaaggacgtcatccagataatgaacgataacatcgacaagttcttggagagacaagaaagagtttctttattggtggataaaacttcccaactaaatagcagcagtaataaatttaggcgcaaagcggtcaatataaaagaaataatgtggtggcagaaggtcaaaaatattacgttattaactttcactattatactatttgtaagtgctgctttcatgtttttctatctgtggtaagtaaataaaaaaaaagg

SEQ ID NO: 2048 - DNA, 2144 bp, Saccharomyces cerevisiae
tctgaaggggtccaagcctaacgattttcgacctttcgttgagacaacttcacgtactcttctgacctgctgtggttgacgtatttagagtttgctgcgccctttgtaaacgatcgtgacccgcggaccatactaggaaaagctcttccgttactactactgctttctcgctattttactctagttgttcatactagtcacacgttgctcgagaacaggaccagcttctttgtttctcccccgcatttaattgtttctgcttctcaattgaacgcatataaatatatttccccagtctttattttgctctctccacgatgttatcactgtctgccaaaaatcacttcacagtgagtaattctataactcacgttattaagtcatatcatataaggactctcacttcaagcgcagaaaaaatgccacatatcactactcctttttctacctcagccagtagtacaaagttaaaagctttcaggaaagttagacccgtcctacagagacatagctcttcctggattgttgctcaaaatcatagacgttcattatctggtcaatcttcgctaaacgacctgcgtcatttgaatcgctttccacaccacacgttgaaaacttcgaataacgagttttatcccgccgaacaattgactttggaagacgtaaatgaaaatgtcttgaaggctaagtacgccgttagaggtgccatcccaatgagagctgaagaattgaaagctcaactggagaaggatcctcaatctctgccatttgacaggattatcaacgccaatattggtaatcctcagcaactacaacagaaacctctgacttactacagacaggtcttgtctctcttacaatacccagaactattaaaccaaaacgaacagcagctagttgattcgaaattgtttaaactagatgccattaaacgtgcaaagagtttaatggaagatatcggtggttctgttggtgcttactcttcttctcaaggtgtagaaggtataaggaaaagtgtcgctgaatttataacgaagagggacgaaggcgagatatcatacccagaggatattttcctaactgctggtgcatccgcagctgtcaattacttgttatcaattttctgtagagggccagaaacgggtgtcttgattccaattcctcaatatccattatataccgctactctagctttgaacaattctcaagctttaccatactatttagatgagaattcaggttggtcaactaatccagaagaaattgaaactgtcgtcaaagaggctatacagaacgaaatcaaacctacagttctagtggttatcaatccaggtaatcctacaggagctgtcctatcacctgagtctatagctcagatttttgaagtcgcagccaagtacggtacagtagtgatagctgacgaagtttatcaagaaaatatcttcccgggcaccaagttccattctatgaagaaaattttgagacatttacagagggaacatccaggtaaattcgataatgttcagctagcttctttgcattcgacttctaagggtgtttctggtgaatgtggtcaaaggggtggctacatggaactcactggattcagccatgagatgagacaagttatcttgaaactagcctcgatttcattgtgtcccgttgtcacaggtcaagctttggttgatttgatggttcgtccaccagtggaaggggaggaatcattcgagtcggaccaagcagaacgtaactccatccatgaaaagttaattacaagagcaatgacactgtatgagacatttaactctttagaaggcattgaatgtcaaaagcctcaaggtgccatgtatttattccctaagatagacttacctttcaaggcagttcaagaagctcgccacttagagttaactccggatgaattttattgtaagaagttgttagaatctactggcatttgcactgttcccggttctgggtttggtcaagaacctggtacttaccatttaagaacaacatttttggcacctggtctggaatggattaagaaatgggaaagtttccataaagaattttttgaccaataccgtgactgaataaaagggggcagaacagtcttcaataaacatttaaatagctagttt

SEQ ID NO: 2049 - DNA, 1412 bp, Saccharomyces cerevisiae
taatttaaactatggaaacaccacccattgtgattgataatggctcatacgaaatcaagtttggtccttccacgaataagaaaccgttccgagctttaaatgcattggccaaagataaatttgggacatcgtatttatcaaatcatatcaaaaacatcaaagatatttcatctatcaccttcaggaggccacatgaactaggacagctcacattatgggaattagagagttgtatatgggattattgccttttcaatccttcagagtttgatgggtttgatctgaaagagggaaagggtcatcatttggttgctagcgagagctgtatgactttaccagaattaagtaagcatgccgaccaggtgatatttgaagaatatgaattcgacagtcttttcaagtctcctgtagcagtctttgtaccatttaccaagtcatataagggtgaaatgagaacaatttcaggtaaggacgaagatatcgatattgtccgtggcaactcagacagtacaaattccacatcaagcgagtccaagaatgcgcaggattcaggtagcgattatcatgatttccaattagttattgattccgggtttaattgtacttggataattcctgtcctgaagggaataccgtactataaagcggtaaaaaaattggacattggaggccgtttcctaactgggctactaaaggaaactctatcattcagacactacaatatgatggatgaaaccatacttgttaacaatatcaaggaacaatgcttgttcgttagcccggtgtcttattttgatagtttcaaaacgaaggataagcatgcactagaatatgtacttcctgacttccaaacaagctttcttggttacgtaagaaaccccagaaaagaaaatgtaccgttacctgaagatgcgcagatcataacactgacagatgagcttttcacaataccagaaacttttttccatccagaaatttcgcaaattactaaaccaggcattgtggaggccatcctagagagcctttccatgttgcccgaaatagtgcgacctcttatggtaggaaacattgtatgtacaggaggaaactttaatctgcccaatttcgcccaacggcttgcggcagaactacaaaggcaattacccacagattggacttgtcatgtttcggtgcccgaaggtgactgtgctctgtttgggtgggaagtgatgtcacagtttgcaaagacagattcctaccgaaaagcgagggtcacaagagaagaatactatgagcatggtcccgattggtgtacgaagcacaggtttggttaccagaattggatataattaactatagatttacatagcaacaatgaaaatccgaaaagtcgagaccttcaggtcattttcaatttggattttgtcatgttt

SEQ ID NO: 2050 - DNA, 3753 bp, Saccharomyces cerevisiae
cacctgttcttcgttacgatatagaaattaaatgtttgttcatcgtctctggacactcgcatttccttttcttgtggagatatcgaaggcatcacagttggagaatattaaatctcttctggacatcgaagataatgtgctaccgaatttgaatatatcgcaaaataatagcaacgcagtacaaatcctcgggggtgtggacgccttatctttttacgagtacacaggccaacaaaatttcactaaagaaataggtccagaaacaagctcacatggattagtttattactctaacaacacctatatccagttggaagatgcctctgatgatactcgaatagacaaaattacaccatttggcgttgattcgtttattcttagcggatcaggcacgataaacaatatctctgtcggaaaccagatattatacaatttgtcgacactgtctatgacgcctatattcaaccagtctttgggagctgttcaggctgtgctcgcagacaattcttctatctattttggaggaaacttttcatataataatggctccatgacgggctatagtgctctcatttgggactccatatcaaataccacccaacttttaccttttggagggtttggtgaaaactccagtgtgaattccatagtcaagctaaataatgacaacattttatttgcaggccagttttatacactggatgatccttctgcgcttatcagtagttcaaataacggtacgaactcaacttcctctttaaacgctactacattggagctaggccaacgaattccactgaggtacgcttcctgggattcccagggaagtacaacgtttgcatctgattcgttagtttgtcctaacactaatgaggatgcatggctttatccggatacgtctgggtctctagtttgtaatttaccatatgaagtttcaccaacaaaaataaggctttataattcccaacgttccgatagtgaaatctccgtgttccaaattctgactgatccatccagtagcataatgaatttaacgtatctggacccactaagtggggagttgaagaattgcggtgaattttgccctttgtatagccgagccactttattatcagcaagccaaaatgtatcttcatccatggacatgattaccttcatcgataacaacaagacagacgtaaaatggacgtcagatttccaagactttgcgtttgtgaatgaacttcccgtttcatcgttaaaatttgtagcattaaattcatacggtggtagtgttggattatccggtttggagctctatcaggacacattctccacttatgctaatgattctctcaacgaatatggctgcagcgcgcttaccaatgattcgtcgtcatctacattgtcgagcaatgattggtataatggtctaacaggtgaaagttatatagccgcgaaatatgttccagatcaaaatgagccaattccacgcgtaaagttttacccaaacattatccaccccggtcactacactatcaacatgtatacaccagggtgtcttcaggataatacgtgctccgcaagaggtattgtaaacgtgaccatgtggaatcaacaaaataacacaataatgaagacgtacttgatttaccagaataatgataatctaaaatatgatcaaatctactcgggatatctagatttctcaccggagatcgttttggagtatgtctcaggaatttatacaaccaacactgcaacagtggtcgtggcagatcaagttaatgtcattactgtttctttagatgcttttaacacactttcagattctagcaacgctaaaaaagaaactttattgaatggtattctccaataccagaaatcaaactttaccagcacgagattgaacgaaacaaaggtaggtaatactactttgaatcttttcccagtaaaaaattaccctaaaaattcttccctttatgctgacatttacgataacaaattagtaattggtggagtaagcaaccgtatttccattgtcgaccttaatgacgactttgaggttacatcaagtaaaaaccaaaccattcaaggtgatgtacatggtataacgaaaactaaccaaggtttactaatatttggagatattctttcatcaaataatcaatcagctgtttttttgtttaatggatcatttgagaatgtcttcaaccaatcgaggacagtgaatagtgcccttaatataagtcttgcaaataacgactttattgttcttgataacgattatgtggtcaatgcatcttccaatgcgcttatacggaactccagttcctttagtctatcactttgggcggctggtaacaatggcgatggcgatgttttgttttcaggtgcagtatctcatatgcaatatggtaatttgaatgggtctgtacgttttttgaacgaaaatgaaatagagccacttaacctagaagggggtattgtaccttacctgggagcttatttaaatgagtctgccacggcatatgcatatgaggtggattctctaaacaaaatttatttttctaatgaagtttatccttcctggaattggtctagcggtattactcaaatgctatacgctgataatcaaactttactagctgtcagtgcaggatcttcaaccacagcagaactgtcgatttttgatttgagaaatttgaccatgattgctaatgaaacactaggatcaaatgctagaataaatgctttagttaactttgaaaaaaactgtagtatgcttgtcggcggagatttccaaatgactgagccgaattgcaccggattatgtctatacaattatgaaagcaaaacttggtctaccttcctcaataacacgatttttggtgaaatcacacaactttccttcaccaactcatcagaattaattatctcaggcctttttgaaacaaaagaataccaatctatacgtttaggatcctttaacttaaccaattctactatgattccattattgagtggttctgaagggaaactgaattcgtttactgtcactgaagactccatagtggcatggaatgatacttcattatttatctatagaaaccaagaatggaatattacctcgttacctggcaatgctagctctattagctctgtttcagctatatacacagatattgaatccaacactttgaacaagagaggaatcaacaatgttaataatggcagtatcctcttacttaatggtaattttaatatttcgcaatacggatacctacaaagtttgttgtttgatttccaaaaatggaccccatattttatttcagaaacaacaaatacttccaattacaatccaataatttttattaatagagacgtttcaactgaattcaactctcagtcaccacttgccaatgtgaacattactgtgacaagtcctcagtcaacatcatcccagcctccatcttcatcggcaagcagtgaatctaaatcaaaatcgaagaagaagaaaataggtcgtggttttgtcgttttaattggtcttgcactagcattagggacagtttctgtccttggtattgcaggcgtcattcttgcctacgtgtttaaggatccagagggtgattataagcccattaaaccgcgaattgatgagaatgaaatgcttgataccgtcccacccgaaaaacttatgaagtttgtctaatcggggttgtattatataatatataactacttaaaataatgaacacttaatataataaa

SEQ ID NO: 2051 - DNA, 2168 bp, Saccharomyces cerevisiae
ccttcatctgctaccgttatattttcagatattaatttagtagcagagagcaagtaccgaaaggaaaacaaaacagaatgatttacaaaatggcacacgtacagcttttgttgttgtatttttttgtgtcaacagtcaaagccttctatttaccaggtgtagcgcctaccacttacagggaaaatgacaacatcccattgctcgttaatcatttaactccatcaatgaattatcaacacaaagatgaggacggtaataacgtttctggcgataaagaaaatttcttgtactcatacgactactattacaatagattccatttttgtcagcctgaaaaagtcgaaaagcaacctgaatccttgggatccgttatatttggtgatcgaatttataattcaccattccaattgaatatgttacaagaaaaagagtgtgaatccctgtgtaagaccgtaattccgggagatgatgctaaattcatcaataaattgataaaaaatggcttcttccaaaactggcttattgatggattaccggctgcaagagaggtttatgatggcagaactaagactagtttttatggtgctggcttcaaccttggttttgtacaggtaactcaaggaaccgacattgaggctactccaaaaggggcagaaaccaccgataaggatgtggaattggaaacacgtaatgatcgtaacatggtgaaaacttacgaattgccttactttgccaaccatttcgatattatgattgaatatcacgatcgtggtgaaggtaactatcgtgtagttggtgttatcgtcgaaccggtttccataaaacgttccagtccaggtacatgtgaaacgactggcagcccattgatgctagacgaaggaaatgataatgaagtttattttacttattccgttaaattcaatgaatcagcgacttcttgggccaccaggtgggacaaatatttacacgtatatgatccttctattcaatggttttctttgataaatttctccttagttgttgtcttattgtcatctgttgttatccattcgctattgcgcgcactgaaaagtgatttcgcacgttacaacgagttaaatttggacgatgattttcaagaagattcgggttggaaattgaatcatggtgatgtttttcgttcgccaagtcaatcgctaaccctttcaattttggttggttcaggagttcaattatttttgatggtaacttgcagtatcttcttcgctgcattgggtttcctatcacctagttctagaggttccttagccactgttatgtttatcttatatgcattattcgggtttgtcggctcttatacatctatgggcatctacaaatttttcaatgggccatactggaaggcaaacttgatattgactccacttctagttcctggtgctattctgctaataattattgcgttgaactttttcttaatgtttgttcattcttctggtgtcataccagcaagtactctgttttttatggtttttctatggtttttgttctcaatcccattatcatttgctggttcattgattgccaggaaaagatgtcactgggatgaacatccaaccaagacaaaccaaatcgcaagacaaatacccttccagccttggtatttaaagactataccagctactttgattgctggtatctttccatttggctccatcgccgttgagttgtatttcatatacacaagtttatggtttaataagattttttacatgtttggtttcctctttttctctttcctcctattaactttgacaagttcactcgtcactattttgatcacttatcattccttatgcctggagaactggaagtggcaatggagaggattcataattggaggcgccggttgtgctttgtatgtgtttattcattctattttattcaccaaatttaagttgggtggattcacgactattgtcttatacgtgggatactcctcagtcatttcattactctgctgtttggtaacggggtcaattggctttatcagcagtatgctctttgttagaaaaatctactcatccattaaagttgactaggccaacgaaaaagaggtcctatatgttgggttagggcgttttttatttatttctctactgtttatcttttttaacaaagaaaatgct

SEQ ID NO: 2052 - DNA, 861 bp, Saccharomyces cerevisiae
cacggcaatagtgcagatattatcgtgacttaatcatattgatttgaggggggaatgaacgctctttacaaccatgctgtgaagcaaaaaaatcaactacaacaagagttggccaggtttgaaaagaattctgtgaccgcccctatttctttacaagggtccatctctgcaactctggtctcactggagaaaacagttaagcaatatgcagaacatttaaacagatataaagaagatactaatgcagaggaaattgatcctaagttcgctaatcgactagcaactttaacacaggatctgcacgactttactgccaagtttaaggatttaaaacaatcctacaacgaaaataattccagaactcagttgtttggctcaggagcatcgcatgttatggactccgataacccctttagtacatcagagaccatcatgaataaaaggaacgttggtggtgcgagtgcaaatggtaaagagggctctagcaacggtgggggactaccgttgtaccaagggctacaaaaggaacagtctgttttcgaaaggggtaacgctcaattagattacattctagaaatgggccaacaatcattcgaaaatatagtggaacaaaacaaaattttatccaaggtacaagatagaatgtcaaatggcctaagaacattgggtgtttcggaacaaactatcacctctatcaataaacgggtgttcaaagataaactagtcttttggatcgcgttaattctcttgatcataggtatttattatgtgttgaaatggttaagatagaagtaaccgtgagttctatatataaataaacataccatatatacatgcatcattataagggttgaaaaaaca

SEQ ID NO: 2053 - DNA, 568 bp, Saccharomyces cerevisiae
agtgaagataaaacaatagcgcatcatgggtagatattcggtgaagagatacaagactaaaagaagaacacgagacttggacctgatctataacgatttgtccaccaaggaatcagtacagaagcttctgaaccagccattggatgaaaccaaaccgggccttggtcagcactattgcatacactgtgccaaatacatggagactgctatagcgttaaaaacgcatttaaagggcaaagtgcacaaaagaagagtcaaggagttgaggggtgtcccttacacacaagaagtctctgatgctgctgcgggctacaatttgaacaagttcttgaaccgtgtacaggagatcacgcaatcggtgggtccggagaaggaaagtaatgaggccttgctgaaggagcatttggacagtaccttggcaaacgtcaaaacaacagaacctactctaccgtgggcggctgctgatgccgaggcgaataccgctgccgtaacagaggcagagtctactgcctcagccagtacttaacagtaaagtaaagatcagaaccaaaaataggcatatacactt

SEQ ID NO: 2054 - DNA, 713 bp, Saccharomyces cerevisiae
ccaaccactatacattttttctcttccttccgcatctttatctggccccggtaggtcatgaagtctagtaagcaattggttcaggacgctaaggattatcgcttcaatccggcgataccattgagaatttacctgaaaacatgcatcggcatattggaaaaggcacagtgtgcgttccaggccaacgacttgtcgctgtcgtttatttattattttagatatgtggatttattgactaacaaactatctagacaccctgagcttttgcgcatggatgcgtcgtcgtcatcgtcgtcatcgtatattcataaaagagaatacctgcaactcataaagttggaagtgcctgcggtctgcaaaattattgaaagcttacgcacccaaattgattctcaatacagcaaattgcaaacatcactcgctaataatatagccaagccgaacataaacgcaaacacaactcccgtgcaggtggagcaacaaccactgccgaagaaatctttcgacgagtatagcttcaaccaatcaatttcttttttccagaaaatttcaaacgcacaacttaataccggagcaagctctcagagtcaggccactgcccgtgatgaagcctacagactgaattatccggagctaccacgccttacattctccacatagcatcctttttttttttttttttccataccatacgaacatacataaccttacat

SEQ ID NO: 2055 - DNA, 2447 bp, Saccharomyces cerevisiae
gcaatatatcaccaatatgagtgtccagaaaatgatgtgggtgcctcgaaaaatggttggaggtagaataccctttttcacatgttcaaaagttttttcaggtttctcgagaaggtcttttcatgagagtccacttgctcgttctacatatgaagaagaaaaagttttggtggatgaaatcaaacaaaaacttactccagacgatattggaagatgtaataaattgcgtaacataggtatatctgctcatattgactccggaaaaactactttcactgaacgtgttctgtactatacaaaaagaatcaaagccattcatgaggttcgtggtagggataatgttggagccaagatggattctatggatcttgaaagggaaaagggtattactattcagtctgccgctacttactgctcttgggataaagagggcaaaaactatcatttcaacttgatcgacactccaggtcatattgatttcactatcgaagtggagcgtgctcttagagtactagacggtgcagttcttgttgtttgtgctgtttcaggtgttcaatcccaaactgtgaccgtggatcgtcaaatgcgtagatataatgttccaagagtaactttcatcaacaaaatggatcgtatgggttcagatcccttccgtgcaatagaacaacttaattcgaaactaaaaatacctgctgctgctgtacaaattcctatcggatcggaatcaagcttatctggtgtcgttgatttgattaatagagttgctatttacaacaagggtgataatggtgaaattatagaaaaagggccagtgcctgaaaatttgaagccattaatggaggaaaaaagacaacttttgatcgaaacacttgctgatgtggatgatgaaatggcagaaatgtttttggaagaaaaggagcctaccacgcaacaaattaaagatgctattcgcagatctacaattgctaggtcttttacaccagttttgatgggatccgcactggcaaatactggtattcagcccgttttggacgctattgtagactacttacctaatccctctgaagtgttgaatacagctctagatgtgagcaacaacgaagccaaggttaacttagttcctgcggtgcaacagccatttgttggattggcattcaaattggaagaaggcaaatatggtcaattgacttatgttcgcgtatatcaggggcgtttaagaaaaggtaattacattacaaatgtaaagactggtaaaaaagtgaaggttgcaagattggtcaggatgcattctagtgagatggaagatgttgatgaagttggctcaggtgaaatttgcgctacttttggtattgactgtgcttctggagatacattcactgatggtagcgttcaatactctatgtcatccatgtatgttccagatgctgttgtctcgttatcgattacgccaaattcaaaggacgcatcgaatttttcgaaggctttgaacagatttcaaaaggaagaccctacattcagagtgaagttcgatcctgaatctaaagaaacaattatttctgggatgggtgaattgcatctggagatttacgttgaaagaatgagacgtgaatataatgtggactgtgtcacgggtaaaccgcaggtttcctatagagaatctatcaccatcccggcagattttgattatacacataaaaaacaatctggtggcgctggtcaatatggtagagttatcggtaccttatctcccgtggatgacattaccaaaggcaacatattcgagaccgctattgttggtggccgtataccggacaagtatttggctgcatgtggtaagggttttgaagaagtatgtgaaaagggaccattgatcggtcatcgtgttttggatgttaaaatgctaatcaatgatggtgctattcatgccgtggattctaatgaattatcattcaaaacagctactatgtcagccttccgtgacgccttcctgagggcacagccggtgatcatggaacctatcatgaatgtttcagtaacatcgccaaacgagtttcaaggtaacgtcatcggtttattgaataaattacaagcagtaatacaggataccgaaaatggtcatgatgaatttacattaaaagcagaatgtgccttgagcacgatgttcggtttcgccacctcattaagagcctcgactcaaggtaaaggtgagttttcattagagtttagtcattacgctccaacagcgccccatgttcaaaaagaattgatatctgagttccaaaagaagcaagcgaagaaatagtcaagtcctcatgggcaaaacagtcttgtaaataacaaattccaataaaaaggaattaacaaaaggcaggaaataaaattaatatacacactaattaagtaaatttaaataaaaagatctttctgtaaatacacgaatgaaaaga

SEQ ID NO: 2056 - DNA, 654 bp, Saccharomyces cerevisiae
gtctaagtttgtgttggtagaatggctggcaaagcagggaggaaacaggctagttcaaatgcaaaaataattcagggcttatacaagcaagtctctttgtttttaggaatggctatcgtacgtctattcatttcacgtaaggttacaattggccaatggattaagctggtggctttgaacgttcctatgttcgttgctctgtatatcattgtgctatccggtaagcccaaatatgatggcaatcgcgtagtaaaacaaggtatagacttgaacgacaatacaaatttgatatcatatttttttgatttgatatatctatcactttttggtaacattggtattatagctttcaggacattcaaattttggtggtgtctactattgtgccccatctatgctggttacaagttatatggcctcaaaaacatgttcatgcctggcgctcaacaaactcaggcagataatcgctcaaaaaatgctaatgagggacaatccaaatccaaaaggcagatgaaaagggagaggaggggtgaaactgactctaaaattaagtacaagtatcgttaaacaaagcttttcaaacgtttttgaaattttttgctttctatagaggagtgtgagtatatacaaaataatatttagatatacttaaaa

SEQ ID NO: 2057 - DNA, 980 bp, Saccharomyces cerevisiae
agagatcaagatgaagtggttgttgtttccggcaagaatcgtagctcgcactcgcccaaacctcttctcgctgtacagaagatccgtttcacagtacttacgtcctcgaaccatccaaaacctgcaatcaatggcgcaaacacccgaacttaaaaccaagctgttcaaacccttggtctggatcgactgcgagatgaccggtttagaccacgtgaatgacagaattatcgagatttgctgcatcatcaccgatggacacctggcacccgtcaaagcggccgatggccaaggagactcgcattatgagagcgtcatccattatggtcccgaggtgatgaacaaaatgaacgagtggtgtattgagcaccacggtaatagcggtctcaccgccaaagttttggcaagtgagaagactttggcccaggtagaagatgagctgctcgagtacatccagcgctacatcccagacaagaacgttggcgtcttggcaggcaatagtgtacatatggaccgcttgttcatggtccgcgagtttcccaaggtcattgatcatctcttttacagaatagttgacgtcagtagcatcatggaagttgcccgcagacacaatcccgctttacaagcacgtaatccaaaaaaagaagctgcccacactgcttatagtgatatcaaagagagcatagctcaattgcaatggtacatggacaactacttgaagccaccacaggaaacagagtcggtcgagtcaatcggatctgaacagccggagtcaccatcttcatctacctcatctttgaaaagacaacgcaccgatttttaatgtagaaaaaaaaaaagaaaaaagaagtgaaatttttcaaatatttcacacacgaaacatgactcctggtgagaaatgaccctttcaggttgctttgaccataaaggtttgactctatctcttgggtttctcatgttcgctttttactctgtataatttt

SEQ ID NO: 2058 - DNA, 1566 bp, Saccharomyces cerevisiae
taacagcttaaaccgaatcctccttaacatgccttacactctatccgacgctcatcataagttgatcacctctcatttggtggacaccgaccctgaagtggactccattatcaaggatgaaattgaaagacaaaagcactccatcgatttgattgcttctgaaaatttcacctcaacctccgttttcgatgcccttggaactccattgtccaacaaatactctgaaggttatccaggtgctcgttactacggtggtaatgaacacattgacagaatggaaattctatgtcaacaaagagctttgaaagctttccatgttactccagacaaatggggtgttaacgtccaaactttatctggttctcctgctaacttgcaggtttatcaagctattatgaagcctcatgaaagattgatgggtctatacctaccagatggtggtcatttgtctcacggttacgctactgaaaacagaaaaatttctgctgtttccacatacttcgaatctttcccatacagagttaacccagaaaccggtattatcgactacgatactttagaaaagaacgccatcctatatagaccaaaggttcttgttgctggtacttcagcatactgtcgtttaattgactacaagagaatgagagaaatcgccgacaaatgtggtgcttacttgatggtagacatggcccacatttctggtttgatcgccgcaggtgtcatcccatctcctttcgaatacgctgatatcgttaccaccaccactcacaagtctttgagaggtccacgtggtgctatgattttcttcagaagaggtgtgagatctatcaaccctaagaccggtaaggaagttctatacgacttggaaaacccaattaacttctctgttttcccaggtcaccaaggtggtccacacaaccataccattgctgctttggccactgctttgaagcaagctgccactccagaattcaaggaataccaaactcaagtcttgaagaatgctaaggctttggaaagtgaatttaagaacttgggctacagattagtttccaacggtaccgattctcacatggttctagtatccttgagagaaaagggtgttgatggtgctcgtgttgaatacatttgtgaaaagattaacattgctttgaacaaaaactctattccaggtgacaaatctgctttggttccaggtggtgtccgtattggggctccagccatgaccactagaggaatgggtgaagaagatttccacagaattgttcaatacattaacaaggctgtagaattcgctcaacaagttcaacaaagcttgccaaaggatgcttgtagattaaaggacttcaaagccaaggtcgacgaaggctctgatgttttgaacacctggaaaaaggaaatttacgactgggctggcgaatacccattggctgtgtaaagaaatcaccacaacgacacttaatcccaaaaaaataaacattactgtataagtattcattttctcctcttctcattatgtatatatgtacctatatgtatgtatgtatgtgcgtacgatttttctaa

SEQ ID NO: 2059 - DNA, 548 bp, Saccharomyces cerevisiae
atgaagctaggacatcgtgagcaacaattctacttgtggtacttcatcgttcacattcccatcaccatattcatcgactcatcagtggttattcccgctaaatggcaactagggattgcgcaaaaggttgttagtgatcacatcgcaaagcaacacgatttcctgctatcagagaaaccagaatggctatactggtttgtagtccttgagctagttctgcaactaccccttttcgtctatttcgtcaataaattctggaattcaagcgaattacaagttaatacaaatagcagattgaaaaagtggttgcgtatctatggctggaatgcctctctaactaccttgatatgtatcgttgttattttcaagcgtggttacattccttacgatgtgctaaaaacaagcttgtccatgacccagaagtgtcagttagcctcggtgtacctacctacattcctaattcctttgcgtttgtgttttgtgtagcctgtgtcggctatatatacagtattagtgactatatagttaattagtgacatatgccacta

SEQ ID NO: 2060 - DNA, 1319 bp, Saccharomyces cerevisiae
attctttggatataacaaaacagctacaactcatggttaataatatcatgcacgagtacgtaccacccagtcagcggctattccatagcaggcatagaataacaagaaacgatttgaaagaagaggccctacattccgggaccacagattggacaacaattctggacacaacaatagataaagatactaatctcattagttatgctgtccccataatagacaactttgccattcctcgagcaaactctcaggggagtcctgtggccccttcgccgaatcacagatcaacgatgtactcttcttcatcttcttctgcgtcttctgtgttttctgatggtttgtttactccaaacaacaacaggaactcatcaggatcatcttcattagtcattagaccacaaaaaaatttgagtgtagattctttgattcaggaaaataaaaggaaaatcaatagtgaaaaagaatcgttatcattaattgccaataataacgatgaaaccttgtgcactcatactgatccatccatacaaaacctcattaaatcggaaacaaagaggaacatcttaaatttaaagtttcaaaatagaaacttatttcgaagagaactaaaattggaaaagttttggagcaatttgagaagttgtcatacatctggcgatgagacggacctgctgttggtgataagtaagcataacttatattggtttgggataccgaacgattttcgtcttccaatatacaagagatgtttatatcactatagcgaactagacgaagccggatttttcagtcagtatgcgaacaactcattgtatctagcaataaggaaatgttgtaacaacgaagagcaggaaactctatcccggtctattttcatcaatttgacgaaaaacgttacctggttgaatagtcgtttcgatgacaataaggacaacaagaattcttacacggttactgaggggaagttctatcaggactttcctaacttatactaccatttaaaggacaagttgaaattaaatgtgataatggatttcatcaagcctgtaataagaaattttatgaccaacgcattgaataagcacaaattagatggtattggtctagaacttttagatattctaatagtgactacctattatggtccgaataaaatcaatgctttcttaatggatacatttatcttaaacttgctaaaacagtgccattacaagttttttgtcagtaatatctctgagctggttattcaaatttctaaaatcgattgtgacttagtcattctgctagaagatttaaggtcacggattgatttagattga

SEQ ID NO: 2061 - DNA, 1257 bp, Saccharomyces cerevisiae
atgtacgatcttttctaactgattttttccgagaaaagttccgcaggctgatttagtttttttctggtggttgtcaagcctctctccacttggtgatagttgcgaaaaatgacagcggatattaatggatattagcgggaataagcacatttccatattgattatttgtatgtctagcaacttataagatgaattataaaaggcatataagttcttcttggtactgaatacatgacactctcactactgtactagagacttattgtcgataaaagaactcaactgcctcaataggaatttttttactaaagcaatcactgattatgaaggtttttatgcatacaatcctcacaaaggtgcagcgattgcatttgtcgttctgtttggcattttaatcctttctgccttggtgcagatcataatggcaacacacacgagcaagagacgtattcatcgctgggaaaacaatgagttgtcagaggaaaattccacaataatatactttcctgcccgcggtttgatgtggacacattttcctttcgttttagggatttgtttagagttcgtgggttatgtgttgaaaatagtctttatcaatagcccctcgatttcgactttcattgctcaatcggtgcttctattgatagcaccttcactttacgcccttagtatttttatgttgttcagcaaaatggcacgtctaattcttatggaggcatatatgttaattcctgcgaaatttagtacagtttctttcgtagtggcagatatgattgggcgtgtcctacaggctgtaggaggtgggttgttatcctcatggaacagcaggaatactgggcgtatcctaattattgtgggtcttttcattcagatattttgttatacctttttaacgttcagtcaactttttcttcactataaaatgaaggcaacgcctagtaaaattgtgcgggatagtaatgaatggttccagtacaattttatacttttagctgggatattgctggttaatggtagaaccattgtcagagtagtacaatttctaatgggcttacaaagctatataggtcagcacgaatggtgcctttacgttttcgatacagttctaatgtttttactacctttgattttcctagcaacctttcgcgcaagaaatttgttcaagctgcaggataaatctgtcaatattcaattaaacaaattattagacaaggaatctgtgtctgaagattaagtagtcaaaaatttattaattaa

SEQ ID NO: 2062 - DNA, 798 bp, Saccharomyces cerevisiae
atgatatttgctccttctttctccctcattaaaaatattctcctggtaagctttctaatcagccacagttttgctgccaaaactttaacgtctagttccaatgacgatacacttgccaggtccgcagctgcagatgcagacatggcattcttcatggagtttttaaacgatttcgacaccgcttttccacagtatacctcatacatgatgcaaaaccatttaaccctacctcaacctgttgctgactactactatcacatggttgatttggcctcaacagcagatttacaatctgatattgctcagagttttccgttcactcaattccaaacattcattacggcctttccatggtatacctctttgctaaacaaagcctccgccaccaccatataccttccccaacacttcataacaggtgagacagaagctaccatgactaactcatcttatgccagccaaaaaaactccgtttccaattctgttcctttctcgacagcgaacgcaggccagtccatgatttccatggctaatgaagaaaacagtacaacagcacttatatccgcatcaaactcttcttcaacatccagaactagtcaatcacagaatggtgcccatgccaaaagcttatatttccccatggcgttgttcggaatctttgcagttgccctttaagtgcctcaaccaaatttgacaatttaattccatgggaggtccgccatcccttttcgctttttttataatatgtgtattatttatacaaatatgtatataagtatgtactttttcaatggacaa

SEQ ID NO: 2063 - DNA, 622 bp, Saccharomyces cerevisiae
acaaatattttagtaagaatacataaagtatctttgctttcacaaataggaacaagcacataaatacagtataatagacatggctgatcaagaaaactctccactacatacagttggtttcgatgctagatttccccaacaaaaccaaacaaagcattgttggcaatcttatgtggattatcacaagtgtgttaatatgaagggcgaagattttgctccgtgcaaggtcttttggaagacctataacgccttatgtcccctagactggatcgaaaaatgggatgatcaaagagaaaaaggtattttcgcaggtgatatcaactcagactaaggatcttagtttcgtttttagtaatgtgcacttagccttttttatatcattattattaattactagaattcatttttgcgtagtagacctacacgggatgaaggatatctatatgaaaagtaaagtaacaataggagataatgaaaaagtgatatcatacgctaacgaatgttcatgatggagccaaattcctaaaaatcaaacaaacagaaaaaaatgagaatgatgtggggtactgaagttttatttttcatatttatttttaattatagtaagtagccatttctatat

SEQ ID NO: 2064 - DNA, 1707 bp, Saccharomyces cerevisiae
acataaatatacggggttcctttatatattagttcattttttttttcagttgtcatacccaaactattatttccttctgaactcctttaaatatatcgttcttccaagctaattgataacagtagtagcatcacaagagaaaaaaaatgcgatcttatatgcagattcttcaaaaatttgccaaatttattgggccagggatattagtcagtgtggcttatatggacccaggaaattatgccactagtgtttccggtggtgctcaatacaaatataccttattattctctatttttatatccaacatttttgccgtacttttgcaatgtctctgtgtgaagctgggtactatcactggctatgatttggctgaaaactgtcgtcataatttgcctaaaaagctaaactataccctttaccttttcgctgaagtggcaatcattgctactgatctggccgaggttgtaggcactgccatcgctttacaaattcttttcaaaataccactaacttggggtgtcttattaacggtgctagatgttttggtaattttaatgttctacacaccaaacggccagtccttaaaaaaagttagggttttcgaatttggcgttgggattttggtcattggaacttgcatttgctttgttttggagctgtttaaagtttcaatcccagacaaagctgaattgtttaaagggtttttgccttcaaatatcatttttaaggaacaacaagctctttacatttcattgggtatcttaggtgccactgtgatgcctcattcattatacttgggctcatccattgttaaaccaagattgcacgattacgatttgaagaaatacggtaaggttaatgcccgcccaagtttaagcgctataaaatatacgttaaactatgcgtacgctgaactaatcatttctttgttcttaattgccacctttgttaattccgctattttaattgttgcaggtgctactttatcaggccaacctgaggcagaggatgctgatttgttatctatttacaaattactggtccactacatatctcctgcggcagggttaatctttgcattggccatgttatgttctggtcaatctgccggtatcatctgtacacttgccgggcaaatcgtttctgagggatttttacagtggtctttaccaccttgggccacaagattgtgcaccagattgattgccattgtaccatgtttatttgttactttaaccatgggggaaaagggaatttcagatattttgaatttttctcaagtggtcttgtccttaattttaccaatcgtttccgctcctttaatttattttaccgcaaatagaaagttgatggttgttcatgacgaaaatggtgtggtaagagcacctgccgatgttaacgccattgctgatgaaaccactccattgaactccaagcacagtaaaatagttgattttactaacagtcgtttgttgacctatacctctgttttcgtatgggctttaatcgggagcttgaattgctatttggtgatttcctatctcttaggtgccgacatccatttttaatggaacctatttattgtcaagtgtgtcgttttctctcgattcttgttttctctcatttctttattctgcataatacaacccaagtatatacttacgtatgcatagccttcagaacaaatgcatactttatctaatatca

SEQ ID NO: 2065 - DNA, 709 bp, Saccharomyces cerevisiae
accacgatcaaacaaataaatcagcaatgggtgcctacaaatatttggaagaattgcaaagaaagaagcaatctgatgttttgagattcttgcaaagagtcagagtctgggaatacagacaaaagaatgtcattcacagagccgctagaccaactagaccagacaaggctagaagattgggttacaaagctaagcaaggtttcgttatctaccgtgtcagagttagacgtggtaacagaaagagacctgttccaaagggtgctacttacggtaagccaactaaccaaggtgtcaatgaattgaaataccaaagatccttgagagctaccgctgaagaaagagttggtcgtcgtgccgctaacttgagagtcttgaactcctactgggttaaccaagattctacttacaagtacttcgaagttatcttggtcgaccctcaacacaaggctatcagaagagatgctcgttacaactggatctgtgacccagttcacaagcaccgtgaagctagaggtttgactgccactggtaagaaatccagaggtatcaacaagggtcacaaattcaacaacaccaaggctggtagaagaaagacctggaagagacaaaacactttgtccttgtggagatacagaaaataagctggttgatggaaaatataattttattgggcaaacttttgtttatctgatgtgttttatactattat

SEQ ID NO: 2066 - DNA, 2036 bp, Saccharomyces cerevisiae
ggctatttccactttaagaataagccttaataattggcaaatagatcgtccttttttccagttttcagcatttgtgtttttttcttgctctttttagcgattagataacattcaagatctaatcaataccccattccaaacaaagaatccaaatataccataaatagggacaaaaaacaaaagagctaaaaatgggcaaatataccaagactgcgatcttgtcagtttatgataagacaggtttattagacttagccaagggattggtagagaacaatgttcgtatcctagcatccggtggtacggccaacatggtcagagaagctggttttccggtcgacgatgtttcttcaattacgcatgcaccagaaatgctagggggtagagtcaagactcttcaccctgctgtgcatgcaggtattcttgccagaaatttagagggcgatgaaaaagatttaaaagagcagcacattgataaggtggattttgttgtatgtaatctatatccgttcaaagaaactgtggctaaaattggtgttacagttcaagaagctgtagaggagatcgacattggcggtgtgactttgttgagagcagccgcaaagaaccattccagagtgactattctttcagaccctaatgactattctatctttctgcaagacctgtctaaggacggtgaaatttctcaggatttaagaaatagatttgcacttaaggcgtttgaacatacggccgattatgatgcggccatttctgactttttcaggaaacagtactccgaagggaaagcccaattaccgctaagatatggttgtaatccccaccaaagacctgcacaagcttatatcactcagcaggaggagttgcccttcaaagtgctctgcggtacaccaggatatataaatcttttggatgccttgaactcatggcccttagtgaaagagttatctgcatcattgaacttgcctgcggcagcatcgttcaagcacgtttctccagcaggtgctgctgtgggacttccattatccgatgtggaaagacaagtttattttgtgaatgatatggaggatttatcaccattggcatgcgcatacgctagggcccgtggtgcagataggatgtcatcctttggtgatttcattgcattgtccaatattgtagatgtcgccactgcaaaaatcatctctaaagaagtttccgatggtgttattgctccagggtatgaaccagaggcattgaatatactatctaagaagaaaaacggaaaatactgtattttacaaatcgatccaaactatgttcctggccaaatggaatcccgagaggtttttggcgtaacgttacaacaaaagagaaacgatgcgatcataaaccaatccactttcaaagaaattgtctccaaaaacaaagcacttaccgagcaagccgttatcgatctaactgttgctacgctggttttaaaatacacacaatcaaattctgtttgctacgcaaagaatggtatggttgtggggcttggggccggccaacaatcgcgtatacactgtaccagattagctggtgacaagacggacaactggtggttgagacaacatccaaaggttttgaacatgaagtgggccaagggaattaagagagcggacaagtcgaatgcgattgatctttttgttacagggcaaagaatagaaggcccggaaaaggtggattacgaaagcaaatttgaagaagtccctgaacctttcaccaaagaagaaagactagaatggttaagcaaattaaacaatgtatcgttatcatccgatgcgttctttcccttcccagacaacgtttatagagctgtgcagtctggtgtaaagttcatcacggctccttcggggtctgtcatggacaaagttgtcttccaagcggcggattcatttgatatcgtctacgtggagaacccaattcgtttattccaccactaagtagggtacattttatgagaagaacagaaacaacatatatagctgaatacaagtgtatatacgtaaacg

SEQ ID NO: 2067 - DNA, 1304 bp, Saccharomyces cerevisiae
aggaatacaagaacacaagagcgataatgtctgccactctgttcaataacatcgaattgctgccccctgatgccctttttggtattaagcaaaggtacgggcaagatcaacgtgctaccaaggtcgacttgggtatcggggcctacagagacgacaacggtaaaccatgggtcttgccaagtgttaaagccgccgaaaagctaattcataacgacagctcctacaaccatgaatacctcggtattaccggtctgccaagtttgacatctaacgccgccaagatcatcttcggtacgcaatccgatgcctttcaggaagacagagtaatctcagtacaatcactgtctggtacgggtgctcttcatatatctgcgaagtttttttcaaaattcttcccagataaactggtctatttgtctaagcctacttgggccaaccacatggccatttttgagaatcaaggcttgaaaacggcgacttacccttactgggccaacgaaactaagtctttggacctaaacggctttctaaatgctattcaaaaagctccagagggctccattttcgttctgcactcttgcgcccataacccaactggtctggaccctactagtgaacaatgggttcaaatcgttgatgctatcgcctcaaagaaccacatcgccttatttgacaccgcctaccaagggtttgccactggagatttggacaaggatgcctatgctgtgcgtctaggtgtggagaagctttcaacggtctctcccgtctttgtctgtcagtcctttgccaagaacgccggtatgtacggtgagcgtgtaggttgtttccatctagcacttacaaaacaagctcaaaacaaaactataaagcctgctgttacatctcaattggccaaaatcattcgtagtgaagtgtccaacccacccgcctacggcgctaagattgtcgctaaactgttggaaacgccagaattaacggaacagtggcacaaggatatggttaccatgtcctccagaattacgaaaatgaggcacgcattaagagaccatttagtcaagttgggcactcctggcaactgggatcatatagtaaatcaatgcgggatgttctcctttacaggattgactcctcaaatggttaaacgacttgaagaaacccacgcagtttacttggttgcctcaggtagagcttctattgctggattgaatcaaggaaacgtggaatacgtggctaaagccattgatgaagtggtgcgcttctatactattgaagctaaattgtaatgattaaataatacttatact

SEQ ID NO: 2068 - DNA, 1886 bp, Saccharomyces cerevisiae
cttgttttgtcgtctggtaaagtttagccattgtaaagtggacaaagaagaagctgcaacgcagataagctgaaaaatagttcacatcccaacagacaatcaaattaagtacatgatggactcgtcaagcaaaagcttaactcagtatataccctcacccatgggatctctatcaaggctaaagcagaagggtgtggacaattttcagaaggtgaaaaaatccggtaaatccatctataattacaactactcaaaattcgttcctcatccattttcaactattgatgaaagtgttaaacactctgaaagtgggcggtatgatgatttggagataattcgtccaacaaaagaaaaggaagtaacaagttctgtgtacaaaagaaacagtggcaagtctctgaatacagaatctcagttttcactgggagattcagatgcagccactttggtgaattcagtcgctactttcaagcttaacaatgcttctacatccacttcactggtgtcttcatcttcaactgtatgttctcaagcgaagtcctcgttacgttccccaacaagtcgtctcaatgatacaaaaatcaaagaggaaaacaattatatttccagcgtgaaagactattgcggtccaatgagaaaatccatggtaaagacggaaatcctcattgaagaacctttgaatcctactaccgatatcaagtcttttataaactcatacaaccatggcaaagcgtatagtctaggtgaaactcaacatttacattattatcagttgccattcccatggagggaaaacagatacataatccatggctataggttttacaatacccattccaaatctttgttgtctatctttaactggtacggctggcataatgaaacttcaaatatttggtctcatttgttaggagccatttatataatctacttggcaatttacgatttccctcagtctgaagtttggcggaattcccaggttccaccacaggctagatggattgttttcatgtttttggcagctgcgttgaaatgtatgctaagctccgtgttttggcatactttcaacggaacgtccttcttgaagctacgttctaaatttgcgtgtgtcgactatagcggtattacgatcttaattacagcttcgatattgacaacggagtttgttaccatgtattcatgttactgggcgatgtacacttacatgagtatttctctggcgctgggtgtatttggtgtgtttatgaattggtcgcctcgctttgatagacctgaagcaaggccattaagaattagattcttcattttgctggctactatgggtgtattgtcgtttttacatttgatatttttgactgatcttcattatgctgcaacgctatttagccccgtcacatacaaatctgttgtttggtatttggttggtgtggtattttacggttcgttcattcctgaacggttcagatctgacgttcaggttgataagaccattccaacaaactacgaattatctactgatttagaaatcatcacaaagcaaagggaaattcattttagagaggtgccaacagcccattccaaatgcagttcctgtccgtctcatgccaaatcatttaaatctctatggtgggttgactattttggttgttcgcacactttttggcatttcttcgtagtgttgggtgtcatcggccattatagagctattttagatatgtttgccaagaggtggattttgtcatgatggtatgactgactacctttacttacaacatcctgcactttttctgtatacgataaacggacttaaaagaaagaaaagcctacaattacattgttggagaagccacatagcaatttcgaaaaaaaccagaaattgtaaacca

SEQ ID NO: 2069 - DNA, 802 bp, Saccharomyces cerevisiae
taaaacacgcaatgcctatcaatcaaccgtcgggacagattaagttaactaatgtttcattagtgagattaaaaaaggctcgcaagagatttgaagtcgcgtgctaccaaaataaggtccaagactatcgaaaaggaattgaaaaagatctggatgaagtgctgcagatacatcaagttttcatgaatgtttcgaaaggcttggttgctaataaggaagatctacaaaagtgtttcgggactacaaatgttgatgatgtcatcgaggagatcatgcataagggagagattcaattatcggaaaaagaaagacaattaatgcttaataaagttaataacgaaatgcttacaatagttagcgctaaatgtataaatcctgtgtcaaagaaaagatatccgcccacaatgatccacaaagctttacaggaactgaagttcagccctgttattaacaaacctgccaaattgcaagctttagaggctatcaaattattggtttctaagcaaattattccaatagtaagggcgaagatgaaagtcaaagtggccataagtgagccatctagacaacccgaacttattgagaagattagtaaattgatagcttcatcgcctggagagtcaacgaagccggaattggatccttggacatgtacaggtcttatcgatcctgtcaattatagagatttgatgaccctatgtgataaaaagggaactgtgcaagtcttggatatggcagtcatagataatacaacgcataactaatttatatagaatcactttgcatacatatctttgataca

SEQ ID NO: 2070 - DNA, 1814 bp, Saccharomyces cerevisiae
gggaaatactcaactatcattgggatccccgtggcacctttacgataagcatggtaaataaggtggttgatgaggttcagcggttggtgagcgcaataattctcacttcgtttatgacggggttattcattttgtcactatggaagaattacgtgacagttcatttccaacataaaaatgatccaagagatacaagaagttcgagaaccaagatccagccaaatgacaagaagaagaaacgaccagcacgtcactctagacctttgtcaatatcttccacaacgcccttagatttacagcgggatcaggaaaataatattgaatatgaccgtactgtgactagcaagctgtccatgactagtaatgcctctttatcagagaacggtgatggaaatgctaatattaaaatggaaacgaatgtgaaccaagccccatatgctgcagagaatcccttccaaaacattgcgcttgcggaggataccaagctggtacctgacttaaagtactattataaagagtatggtattgatattgaagaatttgaggtggagacagacgacggttttatcattgatttgtggcacttcaagtccaggttaaacgatggcgtagaggaagtgaaacgtgaacccattttgctattacacggtcttttgcaaagttgcggggccttcgcatcttcaggtagaaaatctctggcatacttcctttatgaatctggatttgatgtttggttggggaataacagatgtggcttaaatgccaagtggaacatgaaaaaattaggtaatgatcattccaaaaaatgggattgggatatgcaccagatggttcaatacgatttaaaagcacttataaattatgtacttgatagtaccggatatgctaaactatcgctcgtggcgcattcacaaggtacaacacaagggtttatggggcttgtcaacggtgagaaactatacgcaagtgattttaaattagtcgataagctggaaaactttgttgctttggcacctgcagtgtaccctggacctttattggatgaaaaagcatttgtgaggctaatggcaaaaggtattgattctccgtggtactttggtagaagatcgtttatacctcttatgatgacaatgagaaaactaatggttgggaccaagattttttcgttcctctcatacatcatgtttaactacctatttgattggaacgatgtcttatgggatagagttttaagggaccgaaatttcttattttcaccagtccatatttccgtcaaactaatgcaatggtggttgtcacctcttcctaataagctaagttttaagaagggtgcagagaaaatttttccagataaaaagacatggtttcctattgccaagaatgatgatgacagtggcaataatttggataacaacaaactacacttaaatccgaaaagacaaaatagtgaagaatttccacacattataatgtttattccaaagcaagatagattagtagatggtgaacgattaattaatcacttcattaatcatgaagcaaatgcagtgtacaaaatctggtatattgatgagtattcccatctggacgttttatgggcgcatgatgttatagatagaattggtaagccaatgatagaaaatttgaggtttcctaatgcaaggtgaggtaaaagttttttctttgtggtttctttgtaaaatataatatgccataaaaagaggaaagaaaagcataataaatagatatatgtatagagtatatatttatatatatgctagtatatacggatatatgtatctgtagatgttaca

SEQ ID NO: 2071 - DNA, 1058 bp, Saccharomyces cerevisiae
aaaaagatttatattataagaacttgacaatatacagacttttaatatatccgcagaggcaaaaaaataatagagggaactatgaagattcaggcgggccaattgggcctggacgataatgacgtgccgggaccattgccggacacagacagcaaaccctcatcacaatcacaaaatgacacaccaatgtttaaattgggcaactttgaaagtcctgtgctcaaggagctatcacggcgaacggtaaacaaggaaatggagacgcagagaattatgacaaacgtaattgcgtttgcgttctggaacctgctggtgaagttcatcaagttcttttggaacaacactcatgttgggagacagttttgcaaccggctatccagaatccatctgtacatgttgacatttcacacgttaaagaaggctaacatcatatatcacaccacgttcagttggttgaatgcagaacttcttgactacttgttccacctattaatctcgctcaatatactgttttctctttggaagctcttatccaccgtcaaagtaagtgatttgaatctcactgacaggcaaaagaagctcctgggggtagacatgcaatcatctgtcgatactgggttgcagccacaacacccccactacgtatccacttctaagatcagccaaatggcacagaacaaaacacatattcctcaaacaaatctcaaaaatcatccagcatatctcttcaaaggcttagagacgcctttgaaagcaagacaaagggaaatggcggaggaacagacgaaactacaatctcaatccttacacacaaagaatgtatttggcacactgcagaggcatagcggtatcagtagcacattagtgagcgctaacaatgacaataactcgccgcatacccctgtaactaggaagggctacattccaagtagcaaatatgcatatatgatgaactcacagtccccaagggggaaaatataaaaacagcaaaaaaacatttaatactttccatagctatatatgttttctctcctatttatattttacatatgattagc

SEQ ID NO: 2072 - DNA, 790 bp, Saccharomyces cerevisiae
cgttcatcttttttcatttttctttttcttttttttgctttcttttcacataattgacaataaaggcgtcctacaatagaagccttggtataacgtaaaagccacagcaagcatggtgtacttcatttccgactccatttgcgtatagacatgtttcacagacgcaaaagaccttataacaccagaaattatggccatgatgacaagaaattcaaatcgcagtacatcgatattatgccagacttcagcccttccggtctgttagagctggagtcgaataacaaagaaggtatagctttaaaacatgtggagccgcaggacgctatttctccagataactacatggatatgctaggactggaggcgcgagataggactatgtatgaactagtgatatacagaaagaatgacaaggataaaggaccgtggaaaagatacgatttgaacggcaggagctgttatttagtcggtcgtgaactgggccacagtctggatacagatctcgacgatagaacggagatcgttgtcgcagacattggtatacccgaagaaacatcctcaaagcagcactgcgtcatccagttcaggaacgttcgtggcattttgaaatgttatgtaatggatttggattcgtccaatgggacatgtttgaacaacgttgtaattcctggagcgagatatatagagctacgaagtggtgacgtccttacactttcagaatttgaagaagataacgattacgaactcatcttcatgaatgtataaccatatataagaaacacactttcag

SEQ ID NO: 2073 - DNA, 770 bp, Saccharomyces cerevisiae
acgaatagtagtggaatttgtacgtctccactggccgagcacagtttaataaggttgcataaacacttccacccgcacaatatcatgagttctcaaagtaatactggtaattctattgaggcaccacaactacccattcctggtcaaactaatggctctgcgaacgttactgttgatggagctggtgttaatgtcggtatccagaatggttcgcagggtcaaaagaccggaatggacctttattttgatcaagctttgaactacatgggagaacatcctgtgataacaggttttggggcctttttaactttatattttacagccggtgcatataaatcaatatcgaagggacttaacggtggaaaatccactactgccttcttgaaaggcggatttgacccgaaaatgaattctaaagaggctctacagattttgaatttgacagaaaatacattgactaaaaaaaagttgaaagaggttcataggaaaattatgttagctaatcatcctgacaaaggtggttctccatttttggccactaagataaacgaagctaaggactttttggaaaaaaggggtattagcaaataaggtaaaacgggaacctaaaatgagttattgcaattgcatatatgcctaatacaagtggtataaacctcgaaccgtgttcaatcacatgccgtttaggagattaaaatacttcgggcaatcaaatgtttgtatagataagtcttgtaaataacacggaaagctatgtattttagtttaaa

SEQ ID NO: 2074 - DNA, 978 bp, Saccharomyces cerevisiae
taacttctaaacatatcgtcaggacaattgagctgaaaatgtctaatccagatgatttagatgatggactcgcctatgattttgatgccgaacatgaagtaatttttgacgccaaggatggtagtcccccaaccaaaaaggtacaaaagaggtctatagaacaagatgacgatgacgttgatgatatagatgggaaaaaagaggagagaaattcagaagatgattcgaatagacctatttcgaaaagacagaaaaagctacagaaaaaatcaaagctaattgagaaaaagaaagaggaaagccagtatatcgtctcacaacgaaaagcacttccagcaagttcaccagaaaaaattattgagtacctaacaactttgatacgagaaaaaaatcctgacttgagtgttttagaattagaggaactttacttcaaaagaaatgattttctttcgacagaaaaatttgacgctgaacgcagattaagcaatttcccagcctttattcaaaaattttccgtagctccaaaaaaaattgttttttctatgtctaatattagagtagcagacgtttatcgtagtctaaacggtggcaaaaattgcgtcaaattattctctaaaagtaaactaaaggatgacatagccaccgtggaacgtttacttactgacagctctaaaaaatcaaacaaaaataaagattcactatattttattgccactccaacaagaatgcagaaaattatagaagctactgacttacttttccaaggtaaggaaaagttagatatcattcttgatgcaagttatttagatcctaaggataatactatattatcattcgagaatgcagccgtcctctgccaagtcttgaaaacctttttgaataaaaaaagctccgtgaaaatactgttatattaataatagcgctttttcactgaggttctacacataagattacgtttttaaataccagccttaattt

SEQ ID NO: 2075 - DNA, 2092 bp, Saccharomyces cerevisiae
tcaatcataagagtataattccgggataaaagctggagatatcatagtaataatggctaagagaaatagatctcaatttcgcattcaggaaaggactgcaaagaaaagaaagcacgaagattccttgttagaaggcaatgttttccaaaatgcaccggaagatatggatgaaaataccatatatagcgcaaaaggctcatcctgggatgaagaagaacaggattacgaaatggttcctcggaagaatcggtctgatacatcaaatcttgttgaaggcctgcctataaaagttaacggtaaagttgaaagaaaattgcataaagcccaagaaaaaccaaaggacgatgatgaggaagacgaagactctaatgactcttcagaagatgatgagggacctaatgaagaacaagaagcagaggcaaaggaggatgagcctgatacggaggaaaaaattctgcaactaaaagaagacattgccgatttagtcactaaagttatggaggagcctgaagaaaatactgctgcgttggggcgtctatgtaaaatggtggaatctaaaaatcctaatacttgtaagttttccatgttggctttggtccccgtgtttaagagtatcataccaggctatagaattcgaccactaactgaaactgaaaagaaggaaaaagtttctaaagaagtctccaagcttagaaactttgagcaagccttagtttataactacaaaaattacgtcggaagattacagagtctttcaaaaactcccagtaatgctgctcctatacaggtttcattagggattttggccactcaagccgcaaaagaattgatttcaacggcatcccatttcaactttagaacagacattttcactttactgttgcgtagaatttgtaaaccaagaatttcaacagatccaacttccattcaaataatccagacatttgaaactctattaaatgaggacgaagagggctcaatatcattcgagatactaagaattttcaacaaaatactaaagacgaggaacttcaacatcgaagaatctgttttaaatatgttattatcgttagatgtcttacatgactatgaccctaatactaaattgaaaggtaacgttagcgctcctaagctcaaaaagaaagatagggtccatctttctaagaagcaaagaaaagctcgaaaagagatgcaacaaattgaggaagaaatgcgtaacgctgagcaagctgtttctgcggaggaaagagaaagaaaccaatccgaaattctaaaaatcgttttcactatatatttgaatatcttgaaaaacaatgcaaaaacactcattggatcggttttggaaggtctaacgaagtttggtaatatggccaactttgatctattaggggacttcctcgaagtaatgaaagaacttattagtgacactgaattcgataacctttcctctgctgaggtccgtaaggctttgctttgtatcgttagtgcattctcacttatttcaaatacacaatatatgaaagttaatgtggatttgtccaaattcgtcgatgggctttacgcgctattaccttatatctgtcttgatgcagacatcgaattatcttatagatcgctaaggttggctgacccactcaataacgaaataataaaaccatcagttaacgtttctaccaaagcagaacttctgctaaaggctctggaccatgtatttttccgctctaaatcagggactaaagaaagggctacggcgtttaccaaaagattgtacatgtgcatcagccataccccagaaaaaacaagtattgccattcttaaatttattgataaattaatgaatagatatccagaaatttcaggcctttactcttccgaggatagaataggcaacggtcatttcataatggaagccgataatccttcaaggagtaacccagaggcagcaaccttatgggataatgctcttcttgaaaagcattattgtcctgtagttacaaaggggctacgctctctatcatctagatctaaagagtgttctaaatagctagatcctatatattaagtatataaagagccacgattatcgttagcc

SEQ ID NO: 2076 - DNA, 460 bp, Saccharomyces cerevisiae
atgtggtttcctcagatcattgctgggatggctgctggtggtgccgctagtgctatgactccaggcaaggttctctttactaatgctttgggtttaggctgttccagatctagggggttgtttttggaaatgtttggtactgctgtgttgtgtttaacagttttgatgactgctgttgaaaaacgtgaaactaactttatggctgcgcttccaattggtatttctttattcatggctcacatggctttgaccggttacactggtaccggtgtcaaccctgcaagatctctgggtgccgccgttgctgccagatatttccctcattaccactggatctactggattagcccacttttgggtgccttcttagcctggtcagtgtggcaattattacaaatccttgattacactacatacgttaatgccgaaaaggcggcaggtcaaaagaaggaagactgag

SEQ ID NO: 2077 - DNA, 2373 bp, Saccharomyces cerevisiae
tcatcgaaccaggcagcaatgatttttctataatcttctaaagtgaagcatgacgaccatagctcgttgaatatgcatagaacgcttctgtttttaacgtggctgatatctttaacaaaggcttttaatataaaattaccacacactgaaaaaaaagaccatttggaatccaacgctgtgctggcatgcgcatcctatataaatactctgaagtggtcatttgatagctccgtcgtaccgggtttctattctaccatatgctcttattcaccagcgtttgatacttggtcactttgtatcttcaattcgcttacagaccagattattcccatggacaacacaagtttcgaagaaagcttgggtaacgtacgaaaaacgtgctcgtttgtcgataaaaagtttagcaatatttcactggagcaatactactcatctttaaataatgcttcttctcacgctttggaagactatggttctattgaaagtttatcgacatccattcgagtcgatcgtgagacaagatctagatggatacgagcttttcatgcgcatgcctataatttagatatcagcagtgtttatggtgcatatttaacttactacttcgtcatagtgggtattatcgccgtcttcttccatatgagtcactataacggcctgaatcgagcgctatttgcaagccggttcgtcaattatattcggggccattttgtgttgcctacgtttttagtagataagcacgctaatcacttcaagtttctaaacgtggaagtctttacgggactgatgccgaattccttggaggcatggatcatttttggatacacattggcgaacatcatatttttgtccataagttacatcatagacccatataacctcattttcaacagtcacctgtcgcagtttacaagactgttggctgatagatctgggatactggcgtttactcagttccctctcattatcatttttacggcaaggaatagttttctcgaatttttaacaggagtcaagttcaattcctttattagtttccataaatggatcggtagaatcatggtcttaaacgcaacgatacattcgctttcttattcattattcgcaattatcaaccatgccttcaaaataagcaacaaacagctctattggaagtttggtattgcatccataacagtgctttgcgttctactagttctatcgctcggaatagtaaggaaaagacattacgaatttttcctgtacacccacatcatactagcccttttgttcttttactgttgttggcaacacgtcaaaattttcaacggttggaaagaatggatagtggtatccttgctcatttgggggctggaaaagcttttcagaatatggaacattttgcagtttagatttccgaaagcaacactaatcaatttgaacaccagcaacaacccgcacgatgaaatgtttaaagtaatcatacccaaatataaccggagatggcattcgaaaccgggtcaatattgtttcatttattttttacatccattggtattttggcaatgccatccatttaccattatcgacgaaggtgagaagtgtgttttagtgatcaaacctaaaagtggtctcactagattcatttataaccatattttgcaatctttaaatggtaaattacaactccgagtggccattgagggaccttatgggcccagtaatcttcacctcgataaattcgaccatttgctgttactaagtggaggaacaggcttgcctggtccattagatcatgccattaagctgtcacgaaaccctgataaacccaagagtatagatttgatcatggcgatcaaaaatccttcttttcttaacggctataaatccgagatactagagctaaaaaatagccgatcccacgtcaacgtgcaggtttaccttacacagaaaacagctgttacaaaggcagcaaacgcacgagaccaattaatacattttgatgatataatgaccgaactgacaagcttcgcccacatcggcaatgcaagacctaattttagcaatgtaattgaaaacgcaataaaaagtacgccgcctggagattcattagcggtcgtgtgctgcggccctcctgttctggtggacgatgttagaaacaccgtttctcaaaaactcctcggttacccagagagaattatagagtatttcgaggaatatcagtgttggtaaatcttctctccggctccttctgatcctacgcccacctatatctacatatatctacggcactaaaaacttttatgtaccgcataaaaggtgctctttagcaactatttttagttaattatttgcgttttagctttcaggaatttgcttgctaagacgatgtct

SEQ ID NO: 2078 - DNA, 547 bp, Saccharomyces cerevisiae
ctaacaaaagaagatgtctagatctggtgttgctgttgctgatgaatcccttaccgctttcaatgacttgaaattgggtaaaaaatacaaatttattttattcggattgaacgatgctaaaaccgaaatcgttgtcaaggaaacctctactgacccatcttacgatgccttcttagagaaattgccagaaaacgactgtctttacgccatttacgattttgaatacgaaattaatggtaatgaaggtaagagatccaagattgttttcttcacttggtctccagacactgctccagtcagatctaagatggtctatgcatcctccaaggatgccttaagaagagccttaaacggtgtctctaccgatgttcaaggtactgatttttccgaagtttcttacgattctgttttggaaagagtcagcagaggcgctggttctcattaaggtaaatgatttcacaaatgacaacaatcttcaagaaaaatgaaaatgtatatctatatataaaatcgtcatatatatacagaatacatgtatagaattatt

SEQ ID NO: 2079 - DNA, 5243 bp, Saccharomyces cerevisiae
ctaatataaacaagtgatcttttgaaaacaattaagtgcgaaaaaccggcattgtttctttatagttgccagtcgctttttcttttcacttcatttcatcgcatttaagaaacattatactttcctagattttgtactttttagaagagctcatcaaggggggaaaagctacggagaacatgcatcacgtactcaattcaacgagacctgaccatcggttttggttttacgatgacgtaactcagtacggcagaacaaagtaccttaattattatactcccttagtgcttttaatattcacggtgttgttcataacttataacatatggaaacattattactactatgacgttctacacttgaagcaaaaaaatccaattgatgaacttttatactcatctaccgacgaagacgaacagagtccgttgataaataataacaccatcacaactaattacgtggacaataattgtacaaaagacgcactaaaaaatagacacttttctctggaaaagctgaaatcagttaaggtaaatggagaacctcatggtacacctgaaatagttagaagaggcttcattgaaaaatcaagaattatccttgaattttttttggtactttctcaagttataatacattcttttatactattacactatgtcaataaaaacccagagttcacccaacaaggtacgattactggtttggtagaatggtgtgcattgtttatcattgtctctttacgtttagcaaatgtcaaccaaaatttcaaattcataaacaaatatcccggaaatctatggtcggtatcgttcataaactatttggccttgtttatctctatgattttaccctttcgttccattttcattcaccatataaacagtcctatttcgagaaagtattacatttcacaaatatcgattaaccttgcccttttcttgctactcttttttgcgaggataagaaataattttgccatcatctataaaactgacagctggattactccatctccagaaccagtcacttctattgctggattcatatgctgggcttggttagacagttttgtttggaaagcacacaaagttagtatcaaagttaaggatatttggggattgatgatgcaagattattctttctttgtagtgaaaaaattcagatattttgttgaccataaggttaaaaggaagcgtattttttcactaaaccttttctttttcttttcgaattatttggtactacaatgcttttgggcatttttaggcagcgtcctttcttttattccaacagttttactaaaaaggatcctggaatatgttgaagatcagtcatctgctccctcaaatttagcttggttttacgtcactgtcatgtttgtaggtaggatattagtggctatttgtcaagcacaggcactattctttggaaggagagtttgtatcagaatgaaaagtattataatctctgagatttatactaaagctttgagaagaaagatttccaccaacaagactaaaccttctaatgaggatccacaggaaattaatgatcaaaaaagtatcaacggcgatgaggagtccacttcttctgccaaccttggagcgattattaatctcatggctattgacgctttcaaggtttctgaaatttgtggttaccttcattcatttttggaggcttttgttatgactgttgtcgcactggcgctgttataccgtctgctgggttttgctgcgattgtgggtgtcttaatcattgtcgcaatgcttccactgaattataagcttgccaagtacatcggcgatttgcaaaagaaaaacttggctgtcacagataatcgtattcaaaagttgaatgaagcttttcaagctatcagaatcatcaaatacttttcatgggaggagaattttgaaaaagatatcaatactattagagaaaatgaattatctctactgctaatgagatccattgtttggtctatcagttcctttctttggtttgttaccccaactattgtaacagccgcctcatttgcttactacatttacgttcaaggcgaggtattaaccactccggttgcctttactgcactttctttattcacgttattaagagatcctttggatcgtttgtctgatatgttaagttttgtcgttcaatcaaaggtctcgttagatagagttcaggatttcttaaatgaaaatgatacaaagaaatacgatcaactgaccatagatccaaatggaaacagatttgcctttgagaattccaccatctcttgggataaggacaatcaagatttcaaattgaaagacttgaacattgaattcaaaactggtaaactaaatgtcgttattggccccactggttctggtaagacatccctactaatggcattattaggtgaaatgtatctactcaatggtaaggttgtcgtcccagctctagaaccaaggcaggaactaatagtagatgcgaatggaaccactaactctatcgcttattgttctcaggccgcttggcttctaaatgatactgtaaaaaacaacattttattcaatagtccattcaatgaggcaagatataaagctgttgtcgaagcatgcggattgaaacgtgattttgagatcttgaaagccggtgacctaacagaaatcggtgagaagggtattactttatccggtggtcaaaagcagagagtctcccttgctagagccttgtattccaatgctaggcatgtccttttggatgattgtttaagtgcagttgattcacatactgcatcttggatttacgataattgtattactggaccattaatggaagataggacatgtattttggtttcacacaacatcgccttgaccttgagaaatgctgaattggtagtcttactagaagatggtagggttaaagaccaaggtgatccaatagacatgttacagaagggtttgtttggtgaagacgagttagtgaaaagtagtatcttatcgcgtgcaaactcttctgctaacttagccgcaaaaagtagcacaagcttaagtaacctacccgctgtcaaagaacaacaagttagcgtgaacaacaactcctcccactttgaagccaagaaacttcaaaaatcattgaggacagaagctgaacgcactgaagatggtaaattaataaaagaggaaacaaaagaagaaggtgtggttggtctggatgtctataaatggtatttgaaaatttttggtggttggaagattgtttcatttttagcttccttgttcttgatagcccaacttttgtatatcggacaatcatggtgggttcgtgcctgggcgtcacacaatgtcattgctaaaattattcccagagcacaacgcgctattgcatttatctccaagaaggctagtcatctaattgattggaggggctcgtcccaaatcagtatggcgtcagctgaaaaccaaccttccagtggacactctacaatgtattatctggttttgtacctaatcattggttttgctcaggctttattgggagctggtaaaactattttaaatttcgttgctggtatcaacgcgtcaagaaagatatttaatatgattctaaacaaggttttacactccaagataagattttttgatgctactccaacaggtagaattatgaacaggttttccaaggatatcgaagctattgatcaggaactgacaccttatatacaaggcgccttctattcgcttattgaatgtttatccaccgtcatactgattacatttattactccacagttcttatctgttgctatagttgtttcaatattgtattattttgttgggtatttctacatggcaggttctcgtgaattgaaaagatttgaatctatttctagatcaccgatctatcaacatttttccgagactcttgtcggtgttaccaccattcgtgcgtttggtgatgaagggaggtttatgcaagagaatttacacaaaattgatgaaaataataaaccattcttctacttgtgggttgctaatcgttggttggcctttaggatagatatgattggatccttggtcatttttggagctggtttgttcattctattcaatattaataatctggattcgggtatggctggtatatctttgacgtatgctatttccttcactgaaggggcattgtggttggtaagattgtactctgaagtggagatgaatatgaattctgttgaaagagtcaaagaatatatggaaattgagcaagagccatacaacgaacacaaagaaataccgccaccacaatggccacaagacggtaaaatcgaggttaatgatttatcattacggtatgctccaaatctacctagagtaattaaaaatgtttcattttctgtcgacgctcagtctaagatcggtattgttggtagaaccggtgccggtaaatcaactattattaccgccttgttcagatttttggaacctgagacaggccatatcaaaattgataatatcgatatttccggtgttgatttacaaagactgcgtcgttctataactattattccacaagatccaacactattctcagggacgattaaaacaaacctagacccatatgatgaatttagtgacagacagatctttgaagctttgaaacgtgtaaatctaattagtgaagaacaattacaacaaggcgccacaagagaaacaagcaatgaggcttcgtcgactaactccgaaaatgttaataaattcttggatttaagtagtgaaattagcgaaggtggatccaatttgtctcaaggacagcgccaattgatgtgccttgctagatctttactgaggagtccaaagatcatattgctggacgaagctacagcgtccatcgactacagttccgatgcgaagatccaagaaaccataagaaaagagttccaaggtagtacaattttgacaattgcacataggttgagatctgttatcgattatgataaaattttggtgatggatgcaggtgaggtaaaagagtatgatcacccatattctttgttacttaacaaacaaagtgccttttatagcatgtgtgagcatagtggagaattggatatcctaattgaattggctaaaaaagcctttgtggaaaaattgaactctaaaaaggactagctgtttcgatgctaaagtatatatatatatatatatatatatatatatatatatatgtatatacgcacacatgttcac

SEQ ID NO: 2080 - DNA, 849 bp, Saccharomyces cerevisiae
gtgaacacgataactgaaagaaaagatggctccaggtaagaaagttgctccagctccattcggtgctaagtccactaagtctaacaaggctaagaacccattgactcactctactccaaagaacttcggtattggccaagctgtccaaccaaagagaaacttgtccagatacgtcaaatggccagaatatgtcagattgcaaagacaaaagaagatcttgtccatcagattgaaggttcctccaaccattgctcaattccaatacactttggacagaaacaccgctgctgaaaccttcaagttgttcaacaagtacagaccagaaaccgctgctgaaaagaaggaaagattgaccaaggaagctgccgctatcgctgaaggtaagtctaagcaagacgcttctccaaagccatacgctgttaagtacggtttgaaccatgttgtctctttgattgaaaacaagaaggccaagttggttttgattgctaacgacgtcgacccaattgaattggttgttttcctaccagctttgtgtaagaagatgggtgttccatacgccattatcaagggtaaggctagattgggtactttggttaaccaaaagacttctgctgttgccgctttgaccgaagtcagagccgaagacgaagctgctttggctaagttggtttccaccattgacgctaacttcgctgacaaatacgatgaagtcaagaagcactggggcggtggtatccttggtaacaaggctcaagctaagatggacaagagagctaagacttccgactccgcttaaattcatatatagaatttcgaacatcgtaatataattatattttgtatacttac

SEQ ID NO: 2081 - DNA, 1113 bp, Saccharomyces cerevisiae
aatatagttgagctatactttcttgaaatactggagtatacatatttatagggatgttgaacgtgctattgagaaggaaggccttttgtttggtgacgaagaagggtatggctactgccacaacagctgcagctacgcatacccccagattgaaaacttttaaagtttacagatggaatccagacgagccaagtgctaaacctcatttacagtcatatcaagtggatctgaatgactgtgggcccatggtacttgatgcgctgttaaagatcaaagacgaacaggattctaccctaacttttagaagatcatgtagagaaggtatctgcggttcatgtgccatgaacattggcggtagaaacacgctagcttgtatatgtaagatcgaccagaacgaatccaaacaactcaagatctatccattaccccacatgtttattgtcaaagatttggtacctgatttaactaacttctaccaacaatacaaatctatccaaccttacttacagagatcatcgtttccaaaggatggaacggaagtgctacaaagtattgaagatcgtaagaaactggatggtctttacgaatgtattctgtgtgcatgctgctctacttcatgtccatcgtactggtggaaccaagaacagtatttgggccctgccgtgctaatgcaagcctaccgttggctaattgactctagagaccaagctacaaagacaagaaaggccatgctaaacaactccatgtcattgtacagatgtcacaccatcatgaactgtactagaacttgtccaaagggcttgaatcctggtttggctattgctgaaattaagaaatctttggcatttgcctagactatcagaaaaacagctagccccgaagaactcagaagcctctcaaatgattttggcactaataaaagcaccaactattattattattattttcaaggacgaaactcaccattctcacacattcctatacgttaggcgtttatgtttactctctatgactattatttatttatcattggcaatgctatgacccggtctgtatatatgtccatcataggcgacaaggtgttctagtatcttcaggtattgttgtttttaa

SEQ ID NO: 2082 - DNA, 1353 bp, Saccharomyces cerevisiae
gcaagaactgtacggataaggataagtatatcttctatctactacaatacgacaagaactctcgaactctccctcccactttactttaactaatagattatgcagattttcgtcaagactttgaccggtaaaaccataacattggaagttgaatcttccgataccatcgacaacgttaagtcgaaaattcaagacaaggaaggtatccctccagatcaacaaagattgatctttgccggtaagcagctagaagacggtagaacgctgtctgattacaacattcagaaggagtccaccttacatcttgtgctaaggctaagaggtggtatgcagatctttgttaagactttgaccggtaaaaccatcactttagaggttgaatcctccgacacgatcgataacgttaagtcgaaaatccaggacaaggaaggtatccctccggatcaacagaggttgatctttgccggtaagcagctagaagatggtagaaccttgtctgactacaacatccaaaaggaatctactcttcacttggtgttgagactgagaggtggtatgcaaatttttgtcaagacactgacaggtaagactataaccctagaggttgaatcttctgacactatcgacaacgttaagtcgaaaattcaagacaaggaaggtattcctccagatcaacaaagattgatttttgctggtaagcaactggaagacggtagaacgctgtctgattataacattcagaaagagtctacgttgcatttggtgttgagattgagaggtggtatgcaaattttcgtcaaaactctaacagggaagactataaccctagaggttgaatcttccgacactattgacaacgtcaaaagtaaaattcaagataaagaaggtatccctccggatcaacagagattgatttttgctggtaagcaactagaagatggtagaaccttgtctgactacaacatccaaaaggaatctactcttcacttggtgttgagactgagaggtggtatgcaaatttttgtcaagacactgacaggtaagactataaccctagaggttgaatcttctgacactattgacaacgttaagtcgaaaattcaagacaaggaaggtattcctccagaccagcaaagattgatttttgccggtaagcaactagaagatggtagaacgctgtcggactacaatattcaaaaggagtccactcttcaccttgtcttgaggttgaggggtggtaactgatcagtcctcgcaatattttcattatgtcaatatatatatgtttactctccttttttctttttggtttttttttttttttgataaatactccatagaacactaaataaa

SEQ ID NO: 2083 - DNA, 1016 bp, Saccharomyces cerevisiae
atgcctttgttagataccttcaagagttttattcaatcaccgacggaatcaaaggtgaaacaggctaccaacgaggacgaaacaagtggagcaacggggacgcttatgaacgaaatatcaatcttgacctacagccccaagacagtacgagaaatcatccaggtaatccggaagcgattgctacttgggcagaacagaagaaattctcatcgaaattgtatccaggtgatgaagacgctgactttggtctcatatctgatgaataacgggtccaatgaattcatcaagtggctgaaaggaaacatgatactaattgagatcctggaggattttcaggttcaggatcctcgggatgaacgtaaggcggaagatattcaaaagctaagcaggaacgttctggggctgctgcaagacgacgggttactagaaaaacaacgcaaggatgtaatacaattccgctcaagcatatcgactccgggcaggaagtccacggacaatagccatttgaagctggaggaaatgagaagcgagctcacgcgacaaagcttagaaaagaaagcaaagcctcccaccaccagcactagcttagatttccagagacaacggacaaggaatacgcacgaatatgcccgattctctttggatcccctggccgaagaagacagtgaagatacgcccggcgtggcgggtggaataagcaagctctcatttagacccaagtcttcaaataacccgttcagatgattttagagtcttccttgaccaatcatcttattcgcgcagggcaacccatgataggaaatgtccctttaaacgaactgtgggaaatcctgcaaaagtgatgaaagtgacgttttatgaaaagaaagtgaaaaagttcttgtttgacaatattctattccgaaaagtctttgtggtcagtattgtttctagaacgttctagaataatcctggataaaccaatttcggtaccaaaaaaaaaaatagccgcccagtggagcatcacacagccgtac

SEQ ID NO: 2084 - DNA, 1594 bp, Saccharomyces cerevisiae
aatattaaagaccaaaacatagccaagaaagccaactagggaacaatgctttgtgctattagtgggaaagttcctagaaggccagttctatcacctaaatccaggactatttttgaaaagtcgctccttgaacagtatgttaaagatacggggaatgatccgataacaaatgagcccttaagcatcgaagaaatagtggaaatcgtacctagtgcgcaacaagcctcactaacagagtctacaaactctgctacgttaaaagcgaattattcgattccgaatctgttgacaagtttacagaatgaatgggatgctataatgctcgaaaactttaagttacgatcaactctagatagtttaacgaaaaaactgtcgactgtaatgtacgaaagagatgctgcaaagttggtcgctgcgcaactattgatggaaaaaaacgaagattcgaaggatttacccaaatcctcacagcaagcggtagctattacgagagaagaatttttacaagggctgttacaatcttctagagactttgtagcgaggggcaagctcaaagcacccaaatggccgattttaaaaaatttggagctattacaggcacaaaattactcccgtaacatcaaaacattcccatataaagagcttaacaaatctatgtactatgataaatgggtgtgcatgtgtcgctgtgaggatggtgctttacattttacccaattaaaagattcgaaaacgattaccacaataactacaccaaatccccgtaccgggggagagcatccagctattatttccagagggccttgtaatcgtttgctactactatatccaggtaaccaaataactatattggactcaaaaacaaacaaagtcctcagagaaatagaggtagattccgccaatgagattatatatatgtatggtcacaacgaggtcaacacagagtacttcatctgggcggataatagaggaaccataggatttcaatcctacgaggatgattcccagtatattgttcattctgctaaatcagatgttgagtacagcagcggtgtcctacataaggattcattattattagccctttactctccggacggtatattagacgtttacaacttgtcatcacctgaccaggcaagctctagattccccgtagatgaagaagccaagataaaagaggttaaatttgcagacaatgggtactggatggtagtagagtgtgaccaaactgtggtttgctttgacctaagaaaggatgtcggcacgctagcgtatccaacttacacaatcccagaattcaagacgggcaccgttacctatgacattgacgactctggaaagaatatgattgcatactcaaacgagagcaattcgctgacgatatacaaatttgacaagaaaacaaaaaattggactaaagacgaggagagcgccctctgtttgcaaagcgacactgccgatttcactgatatggacgtggtatgcggagatggtggtattgccgctattctgaagacaaatgatagtttcaatattgttgcattgacaccctaaatacgctgacacgtttgtactttctaaataaacctgt

SEQ ID NO: 2085 - DNA, 3259 bp, Saccharomyces cerevisiae
ggaaaataaaaaaaaacaaataaatgggtaagatcaaaaaaggaatagaagcatatgttttaagggcaacgccgaatcgtcaaagaacgggaggaagatcaatacattaagtggaaaaaaaaagctcccgtaatatggatgaaaagacaattaaaaagtcgattctttcatcttccaatgatgaaaaaataatatacaaatcgcgaataaagaaatttcaaaagaatcataaattttatattattctattggttttcatcgccattttacaattcatatcaatagcttttttcactcggggattcttactgtcaagacacgttcttgataatatttcctcacaaaacgaaacgagtaagttacctcctaggttcaacaaggcggtgattttggttattgacgctttgagatttgatttcgctattcctgtaaacgaatcccactctaattacaacttgaactatcataataatatattatcattgtatgattcttttgcaagcgataaggatgcatcttccctattgttgaagttcattgccgacccaccaaccactactttacaaagactcaagggtctcacaacagggtccttaccgactttcattgatgccgggtctaacttcgatggaacagtaatcgaagaggataactttcttaaacagctccatttggcaaataagactgtcaaatttgccggagatgatacatggatggctctgttccatccgttcctttccaacgatagtttcccactagaatcactcaatgtgtgggacttagatactgtcgataacggtgttatggattacttccatgatcatttacagcaggacaaggaatgggacgtcatgattggacacatgctaggtattgaccatgtgggccacaaatatggccccgaccattttactatgagggaaaaacaaattcaagtagatcaatttatcgattggatactaaaatcgatcgatgatgataccttattggttattttgggtgaccatggaatggaccatacgggcaatcacggtggcgactccatcgacgagctcgaaagcactttatttctttattctaagaagccggacatgtggagacttaaagaaacttcgaattacaacattgataatttgggacacgattaccgttcagtgagacaaattgatttggtgtctagtttggcgttattgatgggccaaccgataccatttaacaatcttggatggcctattgacgaaatagcaagaaacgatagagaatggtctcaatttgtcaactcagcgataagccaattacaattatataaggacacgatgcagatccaccatggcaatgacgaaatattggaaccgttagcgaaaaatatatctaacacccccccaacaagcgatccagaaaaatttgttaagctgggtcataaataccaaaaggtcttcttgcagacctgcgaagaactatgggccaaattcgattattattccattgccaccggtataacgctactggccacttcactggtcctgttgatatccattacaaaattaattccttctattgttgtgaatcaaatggttccagaattcgttccgggaattatcataatggtcttagttacaaacctatgtttccatggaattttttacgtttatcaacaaccaagttttgtagaccaattctggggtaccctgttagcgactgcaattggtatcattattggttgttatatcacaatatttgataggtacaactttatttggattgctatgagactgggtgaaacattagctgattattggtcaagaattgctgtcatgtttatgattattcatgctttgcttttcacttccaattcatttactatttgggaggatagaattgtagcattccttttatctactttcggcatgttgacgttgtatgaatttgtcttcttaccaaaaaggcaatccaccactgcattattaactgcaacaatcagtgaaaaggaaggaaccacttcaggggtcaatccttcgacagcaaattcaaattacttaccattaacaagatttgcaagattactaggaggttaccattctgcagttttaatcatttttacccggttagcttctatgattaccatttgtagagaggaacaaggcgaatattgtattccaacatttaataatcaaaacaattcctcgtggtgggttttgggtctctgtttcctaatgatattcatattacctgcatgcatcaccggttattataatctaacatcgtcttatcaagctgcagctccaatttggataaacgttttcctaaagggtatccttggtttgaactttgtttattggtcattgacttcattagaaaataacagtgcggtaatagcaataccgttcttacgggacgtcactatttttaaatttacgttggctagaattattgccggtttttcattgattgcttctaatgtcggctggctaatgggaccactttgtattaaattaaacattcataatactgatgttaagtctcacgaagcaacaattttaggttatactaatatttacggctcagagttttttcttttggtcataaacgttctcattagtatcctactattcaacaaacccctggcccagttgtcatacttcctcatgtgcaaccaactactatcaattttagaaattatcgatcttttaaaattaaaggaaaacataattggtccaattgcgttgggactcttatcttaccaacattttttcaccaccggtcatcaagccacaattccatcagtgcaatgggatatcggatttatgctgtctgaaaaggtaacgttccccttcactcagatagccatcatcctaaatacatttgggcctcatattctcgtctccttatctgtagcgttactgacactgtggtcacagcctcctgatgtgttgaagccacaaacacttttaggaagaattgtgtcaaactgcggtatattactcacttacaatactattttatgtctaagctcctttatttgggttactcacttccgtagacacttgatggtttggaaaatcttctgcccaaggtttatctttgcttctttaagtttaatagtcactcaactggtcgttacttttggtacaattgcatttgctagtgggagattgattaagcacataaatgacattttttggaaatgacgaacttcatttccactctttacttacaaatatactatatatatatatctacatgtaatttagatacaagt

SEQ ID NO: 2086 - DNA, 2057 bp, Saccharomyces cerevisiae
attttatacagaaatatttatacaatgtctaaagctgtcggtattgatttaggtactacctactcctgtgttgctcacttctctaatgatcgtgttgacattattgccaacgaccaaggtaacagaaccactccatctttcgttggtttcactgatactgaaagattgattggtgacgctgctaagaaccaagctgctatgaacccagctaacactgttttcgacgctaagcgtttgatcggtagaaacttcaatgacccagaagtccaaggtgatatgaagcacttcccattcaagttgatcgatgttgacggtaagccacaaattcaagttgaatttaagggtgaaaccaagaactttaccccagaacaaatctcctccatggtcttgggtaagatgaaggaaactgccgaatcttacttgggtgccaaggtcaatgacgctgtcgtcactgtcccagcttacttcaacgattctcaaagacaagctaccaaggatgctggtaccattgctggtttgaatgtcttgcgtattattaacgaacctaccgccgctgccattgcttacggtttggacaagaagggtaaggaagaacacgtcttgattttcgacttgggtggtggtactttcgatgtctctttgttgtccattgaagacggtatctttgaagttaaggccaccgctggtgacacccatttgggtggtgaagattttgacaacagattggtcaaccacttcatccaagaattcaagagaaagaacaagaaggacttgtctaccaaccaaagagctttgagaagattaagaactgcttgtgaaagagccaagagaactttgtcttcctccgctcaaacttccgttgaaattgactctttgttcgaaggtatcgatttctacacttccatcaccagagccagattcgaagaattgtgtgctgacttgttcagatctactttggacccagttgaaaaggtcttgagagatgctaaattggataaatctcaagtcgatgaaattgtcttggtcggtggttctaccagaattccaaaggtccaaaaattggtcactgactacttcaacggtaaggaaccaaacagatctatcaacccagatgaagctgttgcttacggtgctgctgttcaagctgctattttgactggtgacgaatcttccaagactcaagatctattgttgttggatgtcgctccattatccttgggtattgaaactgctggtggtgtcatgaccaagttgattccaagaaactctaccattccaactaagaaatccgaagttttctctacttatgctgacaaccaaccaggtgtcttgattcaagtctttgaaggtgaaagagccaagactaaggacaacaacttgttgggtaagttcgaattgagtggtattccaccagctccaagaggtgtcccacaaattgaagtcactttcgatgtcgactctaacggtattttgaatgtttccgccgtcgaaaagggtactggtaagtctaacaagatcactattaccaacgacaagggtagattgtccaaggaagatatcgaaaagatggttgctgaagccgaaaaattcaaggaagaagatgaaaaggaatctcaaagaattgcttccaagaaccaattggaatccattgcttactctttgaagaacaccatttctgaagctggtgacaagctagagcaagctgacaaggacgctgtcactaagaaggctgaagaaactattgcttggttagacagcaacaccactgctaccaaggaagaattcgatgaccaattgaaggaattgcaagaggttgccaacccaatcatgtctaaattgtaccaagctggtggtgctccagaaggcgcagctccaggtggtttcccaggtggtgctcctccagctccagaagctgaaggtccaactgtcgaagaagttgattaagcttagcgatcgccctgtaaaatatccgaaaagttttacttttgctttcctctgtattttttaatttttttacgataaactaaatcatataatattttatatagaaatgataa

SEQ ID NO: 2087 - DNA, 976 bp, Saccharomyces cerevisiae
aggagcaagaaacactagccaagaatagtcagtataatgtcatcaagacccgctaataaccaaggccccccaaacctccctgccagagataagtcgctcgtgcaaaggttcatggcagtagccaagagcttgcagtttgcatggtttaccggtcattccgtcgtattgatcagctccattctttacctgctcaagatgtcagaattttattacagatcggcatatctcggtgtcatcgaatctttcggtatcatcatttaccagcaatttttcacccgcaatgaaccattgcagactcaagatgccgctgccactaaggcttccataaaatcacgcgttgctggactcctaaagagtgaagacgtgctttatttggttttggccaacttctggttgttcactccaagattttcattcagcttaatcccatttttcgcgtttgctgtattccatgttttaatctacgttgaaaaagttctcttaccaaaagtcttccacctttccagtaaagattcaagtaagatcctcagcttcatcgacaagtttgttgttcagtacaatgacttgtgcatgcactgggtcggtactgctgagctgcttattttcattttggtccttttcagagccattctgtgcttccaaaggtcttggatcatacttgttgtgtacgccatctttattaagttaagatacgaaaactccaagtacatgaaagccgcctttgctcaatggagagttagaatggacgggatcataagccacccatctatcccaccattcgtcaaaagagcttataatgcaattaaaatgagcttgatccgcttgtctgagtaccgcttaagcggtgccccacaagtgaccaagaagcagaattgagttttattattactttttacaagttcaataccttctaattactttgtataacattccactcctctcttttgctttttgttacaatttgttatatattttt

SEQ ID NO: 2088 - DNA, 1288 bp, Saccharomyces cerevisiae
ctgaagtttcgcgttttttccaattttgtattatttcattctactcaattttgaggtaacatcggcgatgaggtctccttctagaagtaacagaatatgaaactaagggcagaagacgtgttggcaaacggaactagcagacataaagttcaaattgatatggaaagacaggttcaaattgcaaaagatttactcgcacagaaaaagttcttagaagctgctaaacgctgccaacaaactttggactctctcccaaaagatggtttgttgcctgatcctgaactgtttactatattcgcacaagctgtatacaacatggaagtacagaattctggtaatctgtttggggacgctcttctggcaggtgacgatggatctgggtctgagtctgagtctgagcctgagtctgatgtgagcaatggagaagaggggaacgagaacggtcaaacagaaattcctaattctaggatgttccaattcgaccaagaagaggaagacttgactggtgatgtcgacagtggtgatagtgaggacagtggcgaaggtagcgaagaagaggaagaaaacgtggagaaagaggaagaacgcttagctttgcacgaattggctaacttcagtccagcgaatgaacatgacgatgaaattgaagacgtatcgcaacttcgcaagtctggtttccacatttactttgaaaatgatctgtatgagaatgctttggacctactggcgcaggccttgatgctgttgggccgccctacagcagatggccaatctctaaccgagaacagcagattgcgcatcggtgatgtgtatatcctgatgggtgacatcgaaagggaggcggagatgttcagtagagccattcatcattacttgaaggcgcttggctattacaagaccttgaaacccgcagaacaagtaactgagaaggtgatacaagcagaatttttggtgtgtgatgctttaaggtgggttgatcaggtgccggctaaggacaaactaaaaagattcaagcatgccaaggctctgcttgaaaaacacatgactacaagacccaaggacagcgagttacagcaggcaaggctcgcacagattcaagacgatattgatgaggtgcaagaaaatcagcagcacggctccaagaggcctctttcgcagcccacgacctccatcggcttccccgccctcgaaaagccccttggtgacttcaatgatctctctcaactggtcaagaagaagcctagaaggcattgatagttttgtgtaaaatgtagcaacctacatacgt

SEQ ID NO: 2089 - DNA, 2793 bp, Saccharomyces cerevisiae
tatggcttatggcccggttgcaatgctggtttagtttccgattacgattttcgatttgaatcctggctccacatctcccaccctctttttttatctctagcatcgtgcgttggattttatattatgaagttcctatattagaataaagtttagtatttacttcccagatctaccggatttacaaagtattgttacctcaccaccaagtgaaaggaaacagtgcagtaactcctcgtgcttacgctaactaaatagatattatattcacgaaatactgcgccagatagcaagcaaacccaaaaaaaaaaaagaaaaagaaaaaggaaacaaagtgggagacagaaaaagagtgaaagaaacatagtatttaccaagtcgaagatttagcacaacaaagactaatctacacgcatactgctcttcttcattattgctttatcttccgcgtaccttagttatgtcacagaatattcaaattggcactagaaaacgttcaagagcaaatatgaataattccactactacgggccctgctaacaatacaagctctaacaagacctttttggataatttcgaagaaacgcgcacaaacaagctgctggacgagatgtttgctcggcaaaattcttttctaacagacaatctgaggaacagtctagacctgaatcaagcagacaatccgctccgtcctcggcaacaccaacaccagttgttcttggacaatgaaaatgccatagaactagacgaggagccgcgtatcattaacaccacaatcaataacagtaataatcataacagtagtcgagtggacgaggatgctgacgatgacatcatttttatcaaagagcagccaattcagttttcgtcacctttgattctgcctagtagcagcagtatcaataacaacaataatattgttacttcaaataatccagggtgcggtaccgcagctacaagcaatagtacgtatatcacgacaccaaagaaattcaagaagcaaagaaccatctcactgcctcagttgcctctatcgaagctgagctaccaatcgaactattttaatgttcctgatcaaaccaacgctatcgtgccaagagtaacgcaaactgaaaatgagctgttgcatctaacggggtcgtgtgcaaagactctggagggcaacaaggcagtgaatctcacgattgctcacagcacttctcccttttccaacccaccagcacaaatagcttccctgcctcaatccaacctcaagaaacaaattggttcttcactacggaaatttacatcaaacggctcttcagaaagcgcatcatccaataaatcaaatttcaaaacggacaaagacggtcactacgtttaccaggaaaacgacatatttggcagtggcggccgctttgttgtgaaggacctattgggccaaggcacgtttggtaaagtacttaaatgcatcgataacaagtatgaacctaattacgtggctgtaaaagtgataagggctgtagatagatatagagaagccgccaaaacagaactaagaattctacagactatcctgaataatgaccctcaaggtcagttccagtgcctcttgctaagggagtgcttcgattacaaaaatcacatttgtttggtgacagatctatacggcaggtccatttacgattttatgtgctccaacggcattgccaggttccccggctctcatattcaggccattgccagacagctaatcagatctgtctgcttcttgcacgatttgggcataatacacacggatttgaaaccagaaaatatcctgatttgtgacgaaacccatattgctcaaaaattgcctttgaaaaccgtacagtcgctaagcaagagacgccgtgaagccagtaaggggaagcgcaaaatcttgaaaaatccagaaatcaaaatcattgatttcggtagcgcaattttccattacgaatatcatcctcctgtaatatccactcgtcactatagagccccggaaattgtccttggcttgggctggtcgttcccctgcgacatttggtccatcgcgtgtgtcctagtagaactggttattggcgaatctctttaccccattcatgaaaatctagaacatatggctatgatgcaacgaatcaatggaacccctttccccacagacattattgataagatgttttacaaatctaaacataaattgggcaactctccatcagacctaaattcaacggtgataaagcatttcgacagaaaaactttaagcttacaatggcctgaaaaaaataaacgcggagataccataaccaccgaaaagtcaatgaaaagggtcttgcagtcatgtgatcgcttagatatttacatctcaaaggtcttgaaacaggattacggcgatagcttaagcatcaattggaatctaccgccggagaaaaactggtctttgataaattcgaaattggcatggaaaagacaaacacattcctcttcttcctcaactactgatgaactcgataaggaaactttcttgttttggtactggttcatcgatctactcaggaaaatgtttgagttcgacccaacaaaaaggattaccgcaaaggacgctctggaccatgaatggtttaatctgggcatactggatgatggtattgcaacttataataatacccaaggatagtgggtgttctcgttctacttttctcttctttttttcacatcttttactagttccgttttttttttttttaactcttctttttcattttccggtttttaataatatttctttaaatttctata

SEQ ID NO: 2090 - DNA, 415 bp, Saccharomyces cerevisiae
cacacaaagtatcttttacgaaacataacacaagaatccaatgtcagggaacccaggaagctcgctgagcgcattgagacctactccacccgagagaggttcgttcccgctagaccacgacggcgaatgcaccaagtacatgcaagagtatctcaaatgtatgcagcttgtgcagaacgaaaatgcaatgaattgtagactactggcaaaggactacctgcggtgcaggatggaccaccaattgatggactacgatgaatggtcacatttaggtcttcctgaggatgctccaggcaacaacggtaaaaccataaaagacgccaccgataataaatagccgcccacatcggaatatcgaataaaagctagacgctgttggtaatatcatactttctacaacaactggtaaagaact

SEQ ID NO: 2091 - DNA, 1831 bp, Saccharomyces cerevisiae
aaaagaaaaaaagaaacattttacgtgatgtctcaagacgaaaatattgtcaaagctgttgaagaatccgcagaacctgctcaagttattcttggggaagatggtaagccattgtccaagaaggccttgaagaaattgcagaaagagcaagagaaacagagaaagaaggaggaaagagctctccagttggaagctgaaagagaagcccgtgaaaagaaagccgctgccgaagacaccgcaaaggacaactacggtaagttgccattgatccagtctcgtgactctgacagaactggtcagaagcgtgtcaagtttgttgacttggatgaggctaaggatagcgacaaagaagtcctcttcagggcaagagtccacaacaccagacaacaaggtgcaacattggcctttttaactttaaggcaacaagcttccttgatccaaggtctagtaaaggccaacaaggaaggtaccatcagcaaaaacatggtcaaatgggctggttcattgaatttggagtccattgtccttgtcagaggtattgtcaagaaggtagatgagccaatcaagtctgctactgtgcaaaacctggaaattcacattaccaagatttataccatttccgagactccagaagcattgccaatccttttggaagatgcctcccgttccgaagctgaagctgaagctgcaggtttgcccgtggtcaacttggacaccagattagactaccgtgtcattgacttgagaaccgtcaccaaccaagctattttcaggattcaagctggtgtttgtgagttgttcagagaatatttggccacaaagaaatttaccgaagtacacacaccaaaactgttgggtgcaccaagtgaaggtggttccagtgtgtttgaggtgacatacttcaaagggaaggcctacctagctcaatctccacaatttaacaagcaacaattgattgtggccgactttgaaagagtttacgaaatcgggcctgtgttcagggctgaaaactccaacacccaccgtcacatgaccgagtttactggtttggacatggaaatggctttcgaagaacattaccacgaagttttggacacgttgagtgagttgtttgtgtttattttcagtgaattgcccaagagatttgctcatgaaattgagttggtacgtaagcaataccctgttgaagaattcaagttacctaaagatggtaagatggttcgtctaacatacaaagaaggtattgaaatgctaagagctgccggtaaggaaattggtgattttgaagacttgagtaccgaaaatgaaaagttcttgggtaagttggttcgcgacaaatacgacaccgacttttacatcctagacaagttccccttggagatccgtcccttctacacaatgcccgacccagccaaccctaagtattctaactcgtatgatttcttcatgaggggtgaagaaatcttgtccggtgcacaacgtatccacgaccatgctctattacaagaaaggatgaaagcccatggtttgtctcctgaggacccaggtctaaaggactactgtgacggcttcagctatgggtgtcctccacacgccggtggtggtatcggtttggaaagagttgttatgttctatttggatttgaaaaatatcagaagagcttcattgttcccaagagatccaaagagattaagaccatgaaggagtctcctccaacgtttttatgtagcgagtgaaggtaaaaaaattttcaacatttctaattttttcctgtcacccacttttattttaactgaattattatatttagctttacacatataagtctcaa

SEQ ID NO: 2092 - DNA, 3240 bp, Saccharomyces cerevisiae
caaagaaaagaaggaaaaagaaaaataagtggtgcctgcacatatttgaatatctactgtaaatagtataacactgcttagctaatttttttctggtcatctggtctctaaagagaaacataagaaaaagataggaacattgaaaggcggtgaaaaggaaacttccttgctactgatatatctataagcatagaagtacgcaagcaaacaagaaaacaaacaagaactacgcatttaaatttcttctgaataacgcaatattgcgggtataaatggaaatgaacatggatatggatatggatatggaactcgcatccatagtttcttctttaagcgccctgtcccatagtaacaacaacggcggtcaggccgccgcggccggcattgtgaacggcggtgctgctggatcacagcaaattggcggcttcagaaggtcgagtttcaccacggcaaatgaagtagattcagagatcttgctgcttcacggttccagtgaatcttcaccgatcttcaagaaaaccgccctatcagttggtactgctccgccattctccacgaactcgaaaaagttttttggtaacggcggcaattattaccagtacagatcaaccgacactgcctccctgtcatccgcatcgtacaataactatcatactcatcatactgcggctaatctcgggaaaaacaacaaggtcaaccatcttctgggccagtattcagcttccattgctggtcccgtttactacaatggcaatgacaacaacaactctggtggggaagggttttttgagaagttcggaaaatctttgattgacggtacaagggaactggaatctcaagatagacccgacgctgtcaatactcagtcccaattcatatcaaaaagcgtctctaacgccagcttagacacacagaatactttcgagcaaaatgtcgagtctgacaaaaacttcaacaaattgaataggaacactactaacagtggttcgctttaccactccagttcaaattcaggctcatctgcgtctttagagtccgaaaatgctcattaccccaagagaaatatctggaacgtagccaacacaccagtatttagacctagtaacaatccagccgctgttggggccacaaatgtcgcgcttcctaaccaacaagatgggcctgcaaataacaatttccccccctacatgaacggcttcccacccaatcagtttcatcagggccctcattaccaaaacttccccaactacttgatcggatctccttcaaatttcatctcccagatgatttcagtacagattccagcaaatgaagacaccgaagactcaaatggtaagaaaaagaagaaggcaaacagaccttcttctgtttcttcaccttcgtcccctccaaacaattctccgttcccgtttgcctaccccaacccaatgatgtttatgccacctccaccactctctgctccccagcaacaacagcaacagcaacaacaacaacaacaagaagaccaacaacagcaacagcaacaggagaatccttatatttactaccctactccaaatcctatacctgtcaaaatgcccaaggacgaaaaaaccttcaagaaaagaaataacaagaatcatcctgcaaataactccaacaacgccaacaaacaggcaaatccttatctagaaaattctatacccacaaagaatacctctaaaaagaatgcttcttccaaatctaatgagtcaacggccaacaaccataaatctcactctcattctcatcctcattctcaaagtctacagcaacagcagcaaacgtatcatcgatcgccgttgttagagcaactaagaaacagtagttctgacaaaaattcaaactcgaacatgtcactaaaagacatctttggccattccttagagttttgcaaagatcaacatggttcacggttcattcagcgcgagttggccacctcaccagcctcagaaaaggaggtcatattcaatgaaattcgcgatgacgccattgagctttcgaacgatgtatttggtaattacgtcattcagaagttttttgaatttggtagcaaaattcaaaaaaatactttggttgatcaatttaaaggtaacatgaaacagttatctctacaaatgtacgcatgtcgtgtaattcaaaaggcgttagaatatattgattccaatcaaagaattgagttagtcctggaattatctgactccgttttgcaaatgatcaaagatcagaacggtaatcacgtaattcaaaaggccatcgaaacaattcctatcgaaaaattaccttttatcttaagttctttaactggccacatttaccatctatctacccactcctacggctgtagggtcattcaaagattgttagaatttggttcgagcgaagatcaggaaagcattttaaacgaattgaaagatttcataccatatctaattcaagaccaatatggtaactatgtcattcaatatgttttgcaacaagatcagttcaccaataaggaaatggtcgatatcaaacaggaaatcatagaaactgtggccaataatgttgtcgaatactctaaacataaatttgcctccaacgtggtcgaaaaatctattctttatggctctaaaaatcagaaggatttaataatttctaagattttaccaagagacaaaaatcatgctttgaatctggaagacgattctccaatgattttaatgatcaaggatcaatttgccaactatgtgattcaaaaattagttaatgtctctgagggtgagggtaagaaattgatcgtcattgccattagagcatatttggataaactaaacaaatctaactccctaggaaatagacatttagccagtgttgagaaacttgcagcattggttgaaaatgcggaggtgtgattagtgttatcatcgttctcctttcactttttactattttttttttttttttttttttttttttttcctccatttgtctttcacttactctattttattttgttttattttgatatctactcttgtccataacatttatgttcccctatattcattatttgcttttttccattacctactttttgtacctcatctctatttttctgcaaaaatctttgcgctcttacgctcttcttatttctgcaacagatagagaatttaacattgtgtatttgaaatcatttgactgagaatactgttgtcatgtctttttacatagaaggaacta

SEQ ID NO: 2093 - DNA, 1759 bp, Saccharomyces cerevisiae
tgtcgagaagaagtgctcgttgaaccatactgctcacaatactctttcattgaactctttattacgttgtcgtcaagtacaactccttcctttatcgcctgcctagcctatagtctgctctcttcgtgtcattccttatagcataatcaatcgcacttcccctttcattgtgcgtttatccaagctttttatttgcctacattcgtgttcgtaagctttaacaacaataagtagcaaaacagtatgggtttcatatcgtcaatactgtgctgctcttccgagacgacacaatccaattccaattctgcttatcgccaacaacagagcagttctctcaataaaaacagaagcgttaaacattccaacacgaaaagccgaacccgtggcgtacatcagacaaactctcctccttctaagacaaattcagccgctactttcagttccactgaacgatccaccggtaaatctgggataagcacgaacgataatgaaaaaaagaagccatcgtcgccgactgcagccgtcaccgccactactactaataatatgacaaaagtagagaagcgaattagtaaagatgatctttacgaggaaaaatacgaggttgacgaagatgaagagatcgacgatgaagataaccgtcgcagtcgtggcattgtacaggaaaaaggagatgctgtgaaagatacttccaggcagaaaaaacaacagcagcaacaacaacaacagtcacaaccacaaccacaaccccagtcacagtcacagtcacagtcgcagtcgcagtcgcagcagcgagggcctactgtacaagtatcgtctgaccatcttatccaagatatgaatttgagtagggtaagtagcagctctcaagccagtgaaacttccaacgatgccgacgacgaagacgatgaagatgaagaatatattgatctaacgcttttgcagcagggccagtatcatgcaccaggttacaacactctgctccccccacaagatgaaagtacaaagggcaagaaatgcctaatactggacctggatgaaaccttggtacactcttctttcaaatacttacgatctgcggattttgttttgtctgtggaaatagatgaccaagtacacaatgtctatgtcattaaaagacctggtgtggaagaatttttggaaagagtcggaaaattattcgaggttgtagtcttcacggctagtgtctctcgatacggtgatcctttgcttgatatattagacacagataaagtcattcatcacagattattcagagaggcttgctataactatgaaggaaactatataaaaaacttatcccagattggaaggccgttatcagatatcatcattctcgataactctccggcatcttatatttttcatccccaacatgcaataccgatttcgtcctggttctcagatactcatgataacgaattattagatattattcctcttttagaagacctttctgtgaaaacctcactggatgtgggcaaaattttggatgtaacaatataatgagcactttcgcccgaatttcttgtggcccccgctaccaaagaatgaagatgaagaagatgaagaaaagaaccagagaacaaaaagttttttctttttttttctttttttttttggctcaacacactgtacccatgctgtcccttgacattttttttttcaacttcttctaccattacgacacaatgtattcatatataaattcataatctaataaaatggtaattttaat

SEQ ID NO: 2094 - DNA, 335 bp, Saccharomyces cerevisiae
cacaatcagataactacacaatcaattatacccaatgactgaaactgacaagaaacaagaacaagaaaaccacgcggagtgcgaggacaaacctaagccatgttgcgtttgtaagccagaaaaggaggagcgggatacatgcatcttattcaatggacaagactctgaaaaatgcaaggaattcattgaaaagtacaaagagtgcatgaagggttatggcttcgaagttccaagtgcaaattagtcttactgacagtctgccgacaaccatttcttgtatatataagaataggtattcacaaactatagtatatactacctgtaaatatgtgcga

SEQ ID NO: 2095 - DNA, 74 bp, Saccharomyces cerevisiae; identical to SEQ ID NO: 899

SEQ ID NO: 2096 - DNA, 74 bp, Saccharomyces cerevisiae; identical to SEQ ID NO: 401

SEQ ID NO: 2097 - DNA, 84 bp, Saccharomyces cerevisiae; identical to SEQ ID NO: 234

SEQ ID NO: 2098 - DNA, 74 bp, Saccharomyces cerevisiae; identical to SEQ ID NO: 232

SEQ ID NO: 2099 - DNA, 73 bp, Saccharomyces cerevisiae; identical to SEQ ID NO: 78

SEQ ID NO: 2100 - DNA, 84 bp, Saccharomyces cerevisiae
ttaatgatgatagcatgatttatgttgctcgaagttaatcgatgtgagcacaatgatttctcaagactacaacggtatctgaat

SEQ ID NO: 2101 - DNA, 90 bp, Saccharomyces cerevisiae
ctacaatgatgataaaatttactattcagttctgcttctgaaccaaaataataggaagataaccaattttaccaaagctcaaatctgatt

SEQ ID NO: 2102 - DNA, 88 bp, Saccharomyces cerevisiae
aagcgtgattataaaaaatgatttaaatatttttctgaggaagtatatgcaggacatattgtgaattaggaattcttcgtttatgatc

SEQ ID NO: 2103 - DNA, 98 bp, Saccharomyces cerevisiae
ttatttgatgaatagacaccacaatcgtcttttttttatccggcgatgattcctttggaatatgtgccatggattacatcatgcatcaccatctgatt

SEQ ID NO: 2104 - DNA, 158 bp, Saccharomyces cerevisiae
aaactttcaacaacggatctcttggttctcgcatcgatgaagaacgcagcgaaatgcgatacgtaatgtgaattgcagaattccgtgaatcatcgaatctttgaacgcacattgcgccccttggtattccagggggcatgcctgtttgagcgtcattt

SEQ ID NO: 2105 - DNA, 158 bp, Saccharomyces cerevisiae; identical to SEQ ID NO: 2104

SEQ ID NO: 2106 - DNA, 5354 bp, Saccharomyces cerevisiae
tatctggttgatcctgccagtagtcatatgcttgtctcaaagattaagccatgcatgtctaagtataagcaatttatacagtgaaactgcgaatggctcattaaatcagttatcgtttatttgatagttcctttactacatggtataactgtggtaattctagagctaatacatgcttaaaatctcgaccctttggaagagatgtatttattagataaaaaatcaatgtcttcggactctttgatgattcataataacttttcgaatcgcatggccttgtgctggcgatggttcattcaaatttctgccctatcaactttcgatggtaggatagtggcctaccatggtttcaacgggtaacggggaataagggttcgattccggagagggagcctgagaaacggctaccacatccaaggaaggcagcaggcgcgcaaattacccaatcctaattcagggaggtagtgacaataaataacgatacagggcccattcgggtcttgtaattggaatgagtacaatgtaaataccttaacgaggaacaattggagggcaagtctggtgccagcagccgcggtaattccagctccaatagcgtatattaaagttgttgcagttaaaaagctcgtagttgaactttgggcccggttggccggtccgattttttcgtgtactggatttccaacggggcctttccttctggctaaccttgagtccttgtggctcttggcgaaccaggacttttactttgaaaaaattagagtgttcaaagcaggcgtattgctcgaatatattagcatggaataatagaataggacgtttggttctattttgttggtttctaggaccatcgtaatgattaatagggacggtcgggggcatcagtattcaattgtcagaggtgaaattcttggatttattgaagactaactactgcgaaagcatttgccaaggacgttttcattaatcaagaacgaaagttaggggatcgaagatgatcagataccgtcgtagtcttaaccataaactatgccgactagggatcgggtggtgtttttttaatgacccactcggcaccttacgagaaatcaaagtctttgggttctggggggagtatggtcgcaaggctgaaacttaaaggaattgacggaagggcaccaccaggagtggagcctgcggcttaatttgactcaacacggggaaactcaccaggtccagacacaataaggattgacagattgagagctctttcttgattttgtgggtggtggtgcatggccgttcttagttggtggagtgatttgtctgcttaattgcgataacgaacgagaccttaacctactaaatagtggtgctagcatttgctggttatccacttcttagagggactatcggtttcaagccgatggaagtttgaggcaataacaggtctgtgatgcccttagacgttctgggccgcacgcgcgctacactgacggagccagcgagtctaaccttggccgagaggtcttggtaatcttgtgaaactccgtcgtgctggggatagagcattgtaattattgctcttcaacgaggaattcctagtaagcgcaagtcatcagcttgcgttgattacgtccctgccctttgtacacaccgcccgtcgctagtaccgattgaatggcttagtgaggcctcaggatctgcttagagaagggggcaactccatctcagagcggagaatttggacaaacttggtcatttagaggaactaaaagtcgtaacaaggtttccgtaggtgaacctgcggaaggatcattaaaactttcaacaacggatctcttggttctcgcatcgatgaagaacgcagcgaaatgcgatacgtaatgtgaattgcagaattccgtgaatcatcgaatctttgaacgcacattgcgccccttggtattccagggggcatgcctgtttgagcgtcatttgtttgacctcaaatcaggtaggagtacccgctgaacttaagcatatcaataagcggaggaaaagaaaccaaccgggattgccttagtaacggcgagtgaagcggcaaaagctcaaatttgaaatctggtaccttcggtgcccgagttgtaatttggagagggcaactttggggccgttccttgtctatgttccttggaacaggacgtcatagagggtgagaatcccgtgtggcgaggagtgcggttctttgtaaagtgccttcgaagagtcgagttgtttgggaatgcagctctaagtgggtggtaaattccatctaaagctaaatattggcgagagaccgatagcgaacaagtacagtgatggaaagatgaaaagaactttgaaaagagagtgaaaaagtacgtgaaattgttgaaagggaagggcatttgatcagacatggtgttttgtgccctctgctccttgtgggtaggggaatctcgcatttcactgggccagcatcagttttggtggcaggataaatccataggaatgtagcttgcctcggtaagtattatagcctgtgggaatactgccagctgggactgaggactgcgacgtaagtcaaggatgctggcataatggttatatgccgcccgtcttgaaacacggaccaaggagtctaacgtctatgcgagtgtttgggtgtaaaacccatacgcgtaatgaaagtgaacgtaggttggggcctcgcaagaggtgcacaatcgaccgatcctgatgtcttcggatggatttgagtaagagcatagctgttgggacccgaaagatggtgaactatgcctgaatagggtgaagccagaggaaactctggtggaggctcgtagcggttctgacgtgcaaatcgatcgtcgaatttgggtataggggcgaaagactaatcgaaccatctagtagctggttcctgccgaagtttccctcaggatagcagaagctcgtatcagttttatgaggtaaagcgaatgattagaggttccggggtcgaaatgaccttgacctattctcaaactttaaatatgtaagaagtccttgttacttaattgaacgtggacatttgaatgaagagcttttagtgggccatttttggtaagcagaactggcgatgcgggatgaaccgaacgtagagttaaggtgccggaatacacgctcatcagacaccacaaaaggtgttagttcatctagacagccggacggtggccatggaagtcggaatccgctaaggagtgtgtaacaactcaccggccgaatgaactagccctgaaaatggatggcgctcaagcgtgttacctatactctaccgtcagggttgatatgatgccctgacgagtaggcaggcgtggaggtcagtgacgaagcctagaccgtaaggtcgggtcgaacggcctctagtgcagatcttggtggtagtagcaaatattcaaatgagaactttgaagactgaagtggggaaaggttccacgtcaacagcagttggacgtgggttagtcgatcctaagagatggggaagctccgtttcaaaggcctgattttatgcaggccaccatcgaaagggaatccggttaagattccggaacctggatatggattcttcacggtaacgtaactgaatgtggagacgtcggcgcgagccctgggaggagttatcttttcttcttaacagcttatcaccccggaattggtttatccggagatggggtcttatggctggaagaggccagcacctttgctggctccggtgcgcttgtgacggcccgtgaaaatccacaggaaggaatagttttcatgccaggtcgtactgataaccgcagcaggtctccaaggtgaacagcctctagttgatagaataatgtagataagggaagtcggcaaaatagatccgtaacttcgggataaggattggctctaagggtcgggtagtgagggccttggtcagacgcagcgggcgtgcttgtggactgcttggtggggcttgctctgctaggcggactacttgcgtgccttgttgtagacggccttggtaggtctcttgtagaccgtcgcttgctacaattaacgatcaacttagaactggtacggacaaggggaatctgactgtctaattaaaacatagcattgcgatggtcagaaagtgatgttgacgcaatgtgatttctgcccagtgctctgaatgtcaaagtgaagaaattcaaccaagcgcgggtaaacggcgggagtaactatgactctcttaaggtagccaaatgcctcgtcatctaattagtgacgcgcatgaatggattaacgagattcccactgtccctatctactatctagcgaaaccacagccaagggaacgggcttggcagaatcagcggggaaagaagaccctgttgagcttgactctagtttgacattgtgaagagacatagagggtgtagaataagtgggagcttcggcgccagtgaaataccactacctttatagtttctttacttattcaatgaagcggagctggaattcattttccacgttctagcattcaaggtcccattcggggctgatccgggttgaagacattgtcaggtggggagtttggctggggcggcacatctgttaaacgataacgcagatgtcctaaggggggctcatggagaacagaaatctccagtagaacaaaagggtaaaagcccccttgattttgattttcagtgtgaatacaaaccatgaaagtgtggcctatcgatcctttagtccctcggaatttgaggctagaggtgccagaaaagttaccacagggataactggcttgtggcagtcaagcgttcatagcgacattgctttttgattcttcgatgtcggctcttcctatcataccgaagcagaattcggtaagcgttggattgttcacccactaatagggaacgtgagctgggtttagaccgtcgtgagacaggttagttttaccctactgatgaatgttaccgcaatagtaattgaacttagtacgagaggaacagttcattcggataattggtttttgcggctgtctgatcaggcattgccgcgaagctaccatccgctggattatggctgaacgcctctaagtcagaatccatgctagaacgcggtgatttctttgctccacacaatatagatggatacgaataaggcgtccttgtggcgtcgctgaaccatagcaggctagcaacggtgcacttggcggaaaggccttgggtgcttgctggcgaattgcaatgtcattttgcgtggggataaatcatttgtatacgacttagatgtacaacggggtattgtaagcagtagagtagccttgttgttacgatctgctgagattaagcctttgttgtctgatttgt

SEQ ID NO: 2107 - DNA, 5354 bp, Saccharomyces cerevisiae; identical to SEQ ID NO: 2106

SEQ ID NO: 2108 - DNA, 3396 bp, Saccharomyces cerevisiae
gtttgacctcaaatcaggtaggagtacccgctgaacttaagcatatcaataagcggaggaaaagaaaccaaccgggattgccttagtaacggcgagtgaagcggcaaaagctcaaatttgaaatctggtaccttcggtgcccgagttgtaatttggagagggcaactttggggccgttccttgtctatgttccttggaacaggacgtcatagagggtgagaatcccgtgtggcgaggagtgcggttctttgtaaagtgccttcgaagagtcgagttgtttgggaatgcagctctaagtgggtggtaaattccatctaaagctaaatattggcgagagaccgatagcgaacaagtacagtgatggaaagatgaaaagaactttgaaaagagagtgaaaaagtacgtgaaattgttgaaagggaagggcatttgatcagacatggtgttttgtgccctctgctccttgtgggtaggggaatctcgcatttcactgggccagcatcagttttggtggcaggataaatccataggaatgtagcttgcctcggtaagtattatagcctgtgggaatactgccagctgggactgaggactgcgacgtaagtcaaggatgctggcataatggttatatgccgcccgtcttgaaacacggaccaaggagtctaacgtctatgcgagtgtttgggtgtaaaacccatacgcgtaatgaaagtgaacgtaggttggggcctcgcaagaggtgcacaatcgaccgatcctgatgtcttcggatggatttgagtaagagcatagctgttgggacccgaaagatggtgaactatgcctgaatagggtgaagccagaggaaactctggtggaggctcgtagcggttctgacgtgcaaatcgatcgtcgaatttgggtataggggcgaaagactaatcgaaccatctagtagctggttcctgccgaagtttccctcaggatagcagaagctcgtatcagttttatgaggtaaagcgaatgattagaggttccggggtcgaaatgaccttgacctattctcaaactttaaatatgtaagaagtccttgttacttaattgaacgtggacatttgaatgaagagcttttagtgggccatttttggtaagcagaactggcgatgcgggatgaaccgaacgtagagttaaggtgccggaatacacgctcatcagacaccacaaaaggtgttagttcatctagacagccggacggtggccatggaagtcggaatccgctaaggagtgtgtaacaactcaccggccgaatgaactagccctgaaaatggatggcgctcaagcgtgttacctatactctaccgtcagggttgatatgatgccctgacgagtaggcaggcgtggaggtcagtgacgaagcctagaccgtaaggtcgggtcgaacggcctctagtgcagatcttggtggtagtagcaaatattcaaatgagaactttgaagactgaagtggggaaaggttccacgtcaacagcagttggacgtgggttagtcgatcctaagagatggggaagctccgtttcaaaggcctgattttatgcaggccaccatcgaaagggaatccggttaagattccggaacctggatatggattcttcacggtaacgtaactgaatgtggagacgtcggcgcgagccctgggaggagttatcttttcttcttaacagcttatcaccccggaattggtttatccggagatggggtcttatggctggaagaggccagcacctttgctggctccggtgcgcttgtgacggcccgtgaaaatccacaggaaggaatagttttcatgccaggtcgtactgataaccgcagcaggtctccaaggtgaacagcctctagttgatagaataatgtagataagggaagtcggcaaaatagatccgtaacttcgggataaggattggctctaagggtcgggtagtgagggccttggtcagacgcagcgggcgtgcttgtggactgcttggtggggcttgctctgctaggcggactacttgcgtgccttgttgtagacggccttggtaggtctcttgtagaccgtcgcttgctacaattaacgatcaacttagaactggtacggacaaggggaatctgactgtctaattaaaacatagcattgcgatggtcagaaagtgatgttgacgcaatgtgatttctgcccagtgctctgaatgtcaaagtgaagaaattcaaccaagcgcgggtaaacggcgggagtaactatgactctcttaaggtagccaaatgcctcgtcatctaattagtgacgcgcatgaatggattaacgagattcccactgtccctatctactatctagcgaaaccacagccaagggaacgggcttggcagaatcagcggggaaagaagaccctgttgagcttgactctagtttgacattgtgaagagacatagagggtgtagaataagtgggagcttcggcgccagtgaaataccactacctttatagtttctttacttattcaatgaagcggagctggaattcattttccacgttctagcattcaaggtcccattcggggctgatccgggttgaagacattgtcaggtggggagtttggctggggcggcacatctgttaaacgataacgcagatgtcctaaggggggctcatggagaacagaaatctccagtagaacaaaagggtaaaagcccccttgattttgattttcagtgtgaatacaaaccatgaaagtgtggcctatcgatcctttagtccctcggaatttgaggctagaggtgccagaaaagttaccacagggataactggcttgtggcagtcaagcgttcatagcgacattgctttttgattcttcgatgtcggctcttcctatcataccgaagcagaattcggtaagcgttggattgttcacccactaatagggaacgtgagctgggtttagaccgtcgtgagacaggttagttttaccctactgatgaatgttaccgcaatagtaattgaacttagtacgagaggaacagttcattcggataattggtttttgcggctgtctgatcaggcattgccgcgaagctaccatccgctggattatggctgaacgcctctaagtcagaatccatgctagaacgcggtgatttctttgctccacacaatatagatggatacgaataaggcgtccttgtggcgtcgctgaaccatagcaggctagcaacggtgcacttggcggaaaggccttgggtgcttgctggcgaattgcaatgtcattttgcgtggggataaatcatttgtatacgacttagatgtacaacggggtattgtaagcagtagagtagccttgttgttacgatctgctgagattaagcctttgttgtctgatttgt

SEQ ID NO: 2109 - DNA, 3396 bp, Saccharomyces cerevisiae; identical to SEQ ID NO: 2108

SEQ ID NO: 2110 - DNA, 1800 bp, Saccharomyces cerevisiae
tatctggttgatcctgccagtagtcatatgcttgtctcaaagattaagccatgcatgtctaagtataagcaatttatacagtgaaactgcgaatggctcattaaatcagttatcgtttatttgatagttcctttactacatggtataactgtggtaattctagagctaatacatgcttaaaatctcgaccctttggaagagatgtatttattagataaaaaatcaatgtcttcggactctttgatgattcataataacttttcgaatcgcatggccttgtgctggcgatggttcattcaaatttctgccctatcaactttcgatggtaggatagtggcctaccatggtttcaacgggtaacggggaataagggttcgattccggagagggagcctgagaaacggctaccacatccaaggaaggcagcaggcgcgcaaattacccaatcctaattcagggaggtagtgacaataaataacgatacagggcccattcgggtcttgtaattggaatgagtacaatgtaaataccttaacgaggaacaattggagggcaagtctggtgccagcagccgcggtaattccagctccaatagcgtatattaaagttgttgcagttaaaaagctcgtagttgaactttgggcccggttggccggtccgattttttcgtgtactggatttccaacggggcctttccttctggctaaccttgagtccttgtggctcttggcgaaccaggacttttactttgaaaaaattagagtgttcaaagcaggcgtattgctcgaatatattagcatggaataatagaataggacgtttggttctattttgttggtttctaggaccatcgtaatgattaatagggacggtcgggggcatcagtattcaattgtcagaggtgaaattcttggatttattgaagactaactactgcgaaagcatttgccaaggacgttttcattaatcaagaacgaaagttaggggatcgaagatgatcagataccgtcgtagtcttaaccataaactatgccgactagggatcgggtggtgtttttttaatgacccactcggcaccttacgagaaatcaaagtctttgggttctggggggagtatggtcgcaaggctgaaacttaaaggaattgacggaagggcaccaccaggagtggagcctgcggcttaatttgactcaacacggggaaactcaccaggtccagacacaataaggattgacagattgagagctctttcttgattttgtgggtggtggtgcatggccgttcttagttggtggagtgatttgtctgcttaattgcgataacgaacgagaccttaacctactaaatagtggtgctagcatttgctggttatccacttcttagagggactatcggtttcaagccgatggaagtttgaggcaataacaggtctgtgatgcccttagacgttctgggccgcacgcgcgctacactgacggagccagcgagtctaaccttggccgagaggtcttggtaatcttgtgaaactccgtcgtgctggggatagagcattgtaattattgctcttcaacgaggaattcctagtaagcgcaagtcatcagcttgcgttgattacgtccctgccctttgtacacaccgcccgtcgctagtaccgattgaatggcttagtgaggcctcaggatctgcttagagaagggggcaactccatctcagagcggagaatttggacaaacttggtcatttagaggaactaaaagtcgtaacaaggtttccgtaggtgaacctgcggaaggatcatta

SEQ ID NO: 2111 - DNA, 1800 bp, Saccharomyces cerevisiae; identical to SEQ ID NO: 2110

SEQ ID NO: 2112 - DNA, 121 bp, Saccharomyces cerevisiae
ggttgcggccatatctaccagaaagcaccgtttcccgtccgatcaactgtagttaagctggtaagagcctgaccgagtagtgtagtgggtgaccatacgcgaaactcaggtgctgcaatct

SEQ ID NO: 2113 - DNA, 119 bp, Saccharomyces cerevisiae
ggttgcggccatatctaccagaaagcaccgtttcccgtccgatcaactgtagttaagctggtaagagcctgaccgagtagtgtagtgggtgaccatacgcgaaactcaggtgctgcagt

SEQ ID NO: 2114 - DNA, 119 bp, Saccharomyces cerevisiae; identical to SEQ ID NO: 2113

SEQ ID NO: 2115 - DNA, 119 bp, Saccharomyces cerevisiae; identical to SEQ ID NO: 2113

SEQ ID NO: 2116 - DNA, 119 bp, Saccharomyces cerevisiae; identical to SEQ ID NO: 2113

SEQ ID NO: 2117 - DNA, 121 bp, Saccharomyces cerevisiae; identical to SEQ ID NO: 2112

SEQ ID NO: 2118 - DNA, 606 bp, Saccharomyces cerevisiae
aaccatagtctcgtgctagttcggtactatacagggaagggaagtcactcgcatacgtgtgtgtgcatttcttgctattgctgcttagcttctctaaaacactgggctagcgtttttcaacgctcgagaggcagagtctcaaggagcctccaatgggcctcacgtattcatctagatggcgcttcggacaacggcatcacataagagatgcagctcctgacttctcctctgatcttcgtgatcagagttttgagtcgtcagactacgagcagtttctcttagtcgttgcatcgggtgctgttgccttaacgatgtgtatatggggttcgggggctgttgccatgatatatatggatgagacagaagtggccccgttgacgagtttaacttagattaagtaggacgcatgatcttgagctcttttcctatactttgtcctatggccagctttctccttattacgaagagattgcgggatgtgggtgcagagtgggaaaatctgagttcggtcatctttgttgttcgtcctaccgcagtatattcctaaacactatgaaatgaccctagttggtccatgatcatttgggtaaaaccatactgcagaca

SEQ ID NO: 2119 - DNA, 203 bp, Saccharomyces cerevisiae
gaatcaaaaatttattttttacacggaaacgatgccacagttgactgaacctgtcttctaacagtagttaattgccagtatttcaaacaagatttgaaatacgagtttcccagaataatttatttggacaggataggaagtccgatttctgtgttgtctcaaacgaggcgatagaattgggatgtcgaagaaagtctacatta

SEQ ID NO: 2120 - DNA, 211 bp, Saccharomyces cerevisiae
tccgggctgataactagatggtgtgatcgggcagtatactaatttatactggacaaagactcgtaaaagatgttctttgtgcttagtcccatactgttttttaagtgtccgggatatttaatcccatgtggaaatgcttcttacacggttatggattacacctcatgtgtagctactatatccattaccgtttacttttcctcaaaatctc

SEQ ID NO: 2121 - DNA, 112 bp, Saccharomyces cerevisiae
gttcgcgaagtaacccttcgtggacatttggtcaatttgaaacaatacagagatgatcagcagttcccctgcataaggatgaaccgttttacaaagagatttatttcgtttt

SEQ ID NO: 2122 - DNA, 72 bp, Saccharomyces cerevisiae; identical to SEQ ID NO: 229

SEQ ID NO: 2123 - DNA, 72 bp, Saccharomyces cerevisiae; identical to SEQ ID NO: 229

SEQ ID NO: 2124 - DNA, 72 bp, Saccharomyces cerevisiae; identical to SEQ ID NO: 230

SEQ ID NO: 2125 - DNA, 74 bp, Saccharomyces cerevisiae; identical to SEQ ID NO: 232

SEQ ID NO: 2126 - DNA, 2479 bp, Saccharomyces cerevisiae
ccagcgaatctaaatacgacggataaagaatggctagtttagaagatcttattcctactgtcaacaagctgcaggatgttatgtacgactccgggatcgatacactcgatttgcccattttagctgttgttgggtcacaatcctccgggaaatcctcgatattggaaacgttagttggaagagattttttacctaggggtactggtattgtcacaagaagaccgttagttcttcaacttaataacatatctccaaattctcctctaatagaggaagatgataactcagttaatccacatgatgaagttacaaaaatatcaggattcgaagctggtacgaagcccttggagtataggggcaaggaaagaaatcatgcagatgagtggggggaattcctgcatataccaggaaaacggttttatgatttcgacgatatcaaaagagaaatcgaaaacgaaacagcgaggatagccggtaaggataagggcatcagtaagattccgattaatttgaaagtgttttcccctcatgttttgaatctaacgctagtagatttgcctgggattacaaaggttcctattggggaacaaccacctgatattgaaaagcaaatcaagaatttgatcctagactatatagccactccaaattgtttaatcttggccgtctctccagctaacgttgatcttgttaattctgaatccttaaagttggccagagaggtagaccctcagggcaaaaggactattggtgtcattaccaaattagatttgatggattctgggactaatgctctagatatcttgtctggaaaaatgtatcctctgaaattggggtttgttggtgtagtgaatcgctcgcaacaggatattcaattgaacaaaaccgttgaagaatcattggacaaagaagaggactatttcaggaaacatccagtctacagaactatttcaacaaagtgtggtacgcgttatttagctaaattgctaaaccagacattattaagccacattagagacaagcttccggatattaaaaccaagttaaataccctgatctctcaaaccgaacaagagctcgctagatacggtggcgtaggagctactactaatgaaagcagagctagccttgttcttcaactaatgaataagttttctacaaacttcatttcatctatagatggtacatcctccgacattaatacgaaggaactctgtggtggtgcccgtatttattacatttacaataatgtttttgggaattctttgaagtcgattgatccaacttctaatttatccgttcttgatgttagaacagcgattagaaattctactggtccccgtcctacattatttgtacctgagttggcttttgacctattggttaaacctcaaattaaacttttactagaaccatctcaacgttgcgtcgagttagtttacgaggagctgatgaaaatatgccataaatgtggctccgctgagctagctagatatcctaaattgaagagtatgttaatagaagttataagcgaactacttagagaaaggttacaacctactcgctcttacgttgaaagcttgattgacatacatcgagcctacatcaatactaatcatcctaattttttaagtgcaacagaagcaatggatgacatcatgaaaacgcgtagaaaacggaatcaagagttattgaaaagtaagttgtctcaacaggagaatggacaaaccaacggtattaatggtacttcatctatctcttcgaatatagatcaagattctgctaaaaacagtgactacgatgatgatggtatcgacgcagaatcgaagcaaacgaaggacaaatttttaaattatttctttggcaaggataaaaagggtcaacctgtgttcgatgcatcagacaagaaaagatccattgccggtgatggaaatattgaagattttagaaatttacaaatatcagatttttcactgggcgatatagatgaccttgaaaacgctgaacctccactgaccgagagagaagaattggagtgcgaattaattaaacgtctgattgtttcatactttgatattataagagaaatgattgaagatcaagtaccaaaggcagttatgtgtttactcgtcaattattgtaaggattctgttcaaaacagattggtaaccaaactctacaaagaaacactgtttgaagaacttttagttgaggatcaaactttagctcaagatagagaactatgtgtgaaatcactcggagtttataaaaaggctgcaacccttattagtaatattctgtaattgcataattcatctcatttttgatcttacttcaacattgcgggcgtgattataggtcagtgtttattcctttactcagttgatgatttcaaatgtgctctcctctccattctttttcttgttaataaaaatccataactaaataaataacaaatattagcaatcgcaaaagtatt

SEQ ID NO: 2127 - DNA, 1356 bp, Saccharomyces cerevisiae
tgagagagtcaatataatacctgtagcctttttctgaaaatgactgatagtgagaatgaatccaccgaaacggattcgttaatgacgtttgacgattatataagcaaagagctacctgaacatttacagagactaatcatggagaatttgaagggttctactactaatgacttaaagcaaacttcaaacaactcagagtttaatgtcagtaaaaacgggagcttcaaaggtctcgatgatgcaattcaagctttgcaaatgcaaagcgtgttgcatccttcttcgttaggatcgttagcaacgtcctccaaattttctggatggtcgtttgctcaagggttttttgtaggacagctaagcatagtgttgttgttcatctttttcctaaagttctttatattcagtgatgagccatctaaaagtaagaatccgaaacctgcagcctcccgtcacagatcaaaatttaaagaatatccctttatatctcgcgaattcctgacttctcttgttaggaagggtgctaaacaacactacgagctcaatgaagaggcagaaaatgaacatcttcaagaactagctcttattttagagaaaacctattataatgtcgacgtgcaccctgcagagtcattggactggttcaacgttttagttgcccaaataatacagcaattccgcagtgaggcttggcacagggacaatatccttcattccttgaatgattttattggaagaaaatcacccgatctgcctgaatatttggataccataaaaataactgaactggatacaggtgatgatttccccattttctcgaattgcagaatacaatattcgccaaattcaggaaataaaaagctagaggctaaaattgatatagatttaaatgaccacttaactttaggagtagaaacaaaactattacttaactatccaaagcctggtattgccgcactccccataaatctagtagtgtcaattgtgaggtttcaggcgtgtttgaccgtatctttaactaatgcagaggagtttgcttctacttcgaacggtagcagtagtgaaaacggtatggagggcaattcaggatactttttgatgttttctttttctcctgaatatagaatggaatttgaaatcaagtcgctaattggctcacggtctaaacttgaaaatattcccaagatcggcagtgtcattgaataccaaataaaaaaatggttcgttgaacgatgcgttgaaccaagattccaatttgtcaggttaccaagtatgtggccacgtagtaaaaatacgagagaagaaaagcctacagagttataaatatttatgtacaaattttttgttctatctttttcc

SEQ ID NO: 2128 - DNA, 2396 bp, Saccharomyces cerevisiae
cctacaacagcgtcttatatatatactatggtggtaggaactaaaaaatactctaatttggactttgtccctacaatcagtgacagtgaagacgatgttccaattctagattcttctgatgacgaaaaagtcgaggctaagaagactacgaagaagcggaagggtaagaataacaagaaaaaggttagtgagggggataacctcgatgaggatgttcatgaggacttggacgcggggtttaagtttgatttggacgccgatgataccacttcgaacttccaaggctggaactttctagcagagggcgagtccaataaggacgatgccgaagcttttgtgaagaaggacgttgacttggataagattattagaagaaaaggtgggctggtgaaaatggcccatattgatagtaaacaagaagaagaaaccgagaaagaaaaagtagaaaaagaaaacgatagcgacgatgaggaattagcaatggacgggttcggtatgggagctcccatgaacaatggagacgaaaatcagtcagaagaagaagaagaagaggaggaaaaggaagaggaagaggaggaagaggaggaacaagaagagatgacgttagaaaaaggcggcaaagatgacgaaatagatgaagaagacgattctgaagaggcaaaagccgatttctatgcgcctgaaactgagggagatgaagctaaaaagcaaatgtacgaaaatttcaacagtttgtctttatctcgtccggttcttaagggccttgcaagtttgggttacgtcaagccttcccctattcaaagcgccacaatccccattgccttattgggtaaagacatcattgccggtgctgtgactggttccggtaagactgctgcgtttatgattcccataatcgagcgtttgttgtataaaccagccaaaatcgcttccaccagagttattgttctattgcccactcgtgagttagctatccaagtcgctgacgttggtaaacaaattgcacgtttcgtctccggtataacctttggtctggccgttggtggtttgaacttgagacaacaagaacaaatgttgaaatctcgtccggacatcgtcattgctaccccaggtagattcattgatcatatcaggaactcagcaagttttaatgtggactcagtagagattctggttatggatgaagccgatagaatgttagaagaaggttttcaagatgaactgaacgaaattatgggcctattaccaagcaatagacagaacctattgttttctgctacaatgaactccaaaattaaaagtttagttagtctttctctaaaaaaaccagtaaggattatgattgatcctccaaagaaagctgctactaagttgacacaagaattcgttcgtattcgtaaaagagaccatttgaagcctgccttgttatttaatttgattaggaaattggatccaacgggtcaaaagaggattgtcgtttttgtggctagaaaagaaactgctcataggttaaggattatcatgggtcttttaggtatgagtgtgggtgaattacacggttctttaacccaagaacagcgtttagattccgttaataaattcaaaaatttggaagttcctgtacttatctgtacggatttggcctccagaggtcttgatatccccaagattgaggttgttatcaactacgatatgcccaagagttatgagatctacctgcatagagttggtcgtaccgccagagctggtagggaaggtcgttccgtcaccttcgtcggtgaatcatctcaagatagaagtattgtacgtgctgctataaagagtgtagaagaaaataagtccctaactcaaggtaaagcacttggtagaaacgtagactgggttcaaatcgaagaaacaaacaaacttgttgaatccatgaacgatacgattgaagatattctggtggaagaaaaggaggagaaggaaatattaagggctgaaatgcaattaagaaagggtgaaaatatgttgaagcataaaaaggaaatccaggcaagaccaagaaggacatggttccaaagcgaatcagataagaaaaattccaaagtattaggtgctttatcaaggaacaagaaagtcactaacagcaaaaagagaaagcgtgaagaagctaaggcagatggcaatggtgcacgttcttatagaaaaaccaaaaccgaccgtattgcagatcaagaaagaacttttaaaaagcagaagagtacaaattcaaataagaagaagggcttcaaaagccgtaggtaataattttcatcgtcattatcataaaatatcaacatacttatcactgtcattatattattaatactttgtatttaaatatcattaattcatctaataaacaggggattagt

SEQ ID NO: 2129 - DNA, 1907 bp, Saccharomyces cerevisiae
tatatatatatatacatatatatatagaaatctattgttatacacaaaaatacttattttttaatatagatggctgcagataaagtaatagttttatatataggtatatttactgcacaattcacacgatgggtgtttctgcggtgttgaaaagagctaggaatttactagcaacgttcatagtctgctgttttatggcagtagtgcttgttctggcgctggcacaccattttataaatgagcacagagacactaggagttcatcgacccaaatcgaagttgatgacgaaagtaaaagaaacgtacaccatgaccatgttctcactagaaccaatgcatacgcgacgccatacctcgatctggaacatgacaagaaaaacggtatcgtctacgatcatacaagaacggttgtccgtaaaaagaaccacgaagtggggtcctcgtcactgcataaaaacctttttcacaaatttttgacaaagcttatttttaggtttatcgagaaggaaaaagttaccgaaggcgtaacgcaaggaaagttcaataatagtagcaatgaaattgccaatcatgaaccggtttttgaaaaaattcctgtacagtgcgacaatccattacagaatctaatcttatcggaagacttgacattagttgcggatcttaattattattttaaccagtacaatattcaaatagaggaatttagattggagaccgaagatgggtttgttatagatttgtggcacttgataccaaaatatagaacgacagattctgacaagaagaagaggccacccattttgatgctacatggccttttgcaaagcagtggttcgttcgcatccaatggtagaaaatctctggcatattttctgtatcaatccggttacgacatatggttagggaataacagatgcgggtttaggccggaatggaacgaagcgaaagtaccgacactagcttccaggtgggactgggaccttcgcgagatggttaagtacgatctgacccttttgattgataccgtgttagctaagacgcagtttgaaaagcttactttgatctcgcattctcagggcactacacaggggtttatgggcttggtcaacgaagataagtttttccctcccggttcgggatctaaagaatcttttttcacttctaagatcgcaaactatattgccttggcccccgcagtgtatcctggtcccttacttaacgagaaattgtttgttaagcttatgacaaaggaaatcgaaaatccctggttctttggtgaaacgagcttttttgagataatgatgattgtaagaaacttgtgcgttggtgagagcttgttctcctttgtttgttacaccatcttcaattacctgtttgattggaacgataccctttgggataccgcattaagagatcgccatttcctgttttcgccagtccatgtttcagtgaagttgatgcaatggtggctgtcacccgaccccaacaaggtaagttttaaatttggttcccataagatgttccccgacaatgttaagtggttttcagacgcatcaaaggccccaaatatctacttgtttgttccaaagcaagatagattggtggacggagaaagactaatcaatcatttcgtcaatgtggagtcgaatgtcaactacaagatctggtacattgatgagtatgcccatattgatgtcctatgggcacatgatgtcatagagagaattggtaaaccaattttacagaatttgaacaactattactccaagaagccatccagcgcctttgaaagtgattgttcggacacagaggtggaaacggagctggaaatggttgctgagaaggcttgaagaggaagcatgatatataggttaatataaattatacttgggaatacatagatagag

SEQ ID NO: 2130 - DNA, 515 bp, Saccharomyces cerevisiae
acagcggcagacagatagaaatgagctcaaatgaagaggtatttactcagataaacgcaactgcgaatgtggttgataataagaagcgtttacttttcgtgcaagatagctcagcacttgttctagggcttgttgcaggatttttgcaaatcgagtcagtccatgggtttatttggttcctgattctgtacaacttgattaatgtcatttacattgtttggatctgtcaacttcaaccaggaaagttctaccaaagcccacttcatgacatttttttcgaatcgttttttagagagataactggttttgtcatggcatggacatttggatacgccctaatcggatgaacatataagaactacttctataaacggttagaaacaggcttgatttattatgtacagtaaatataatgttatttgtgttttttttttttaaatttttttagttccttctatgtaaaaagacatgacaacagtattctcagtcaaatgatttcaaatacacaatgttaa

SEQ ID NO: 2131 - DNA, 2859 bp, Saccharomyces cerevisiae
aaagaaatcaactacacgtaccataaaatatacagaatatatgaacgaccaaacgcaatttacagaaagggctctaacgattttgacgttggctcaaaaattggcttcggatcatcaacatccacaattacaacctatacatattctagctgccttcattgaaacgccagaagatggatcagtcccttacctacagaatctaattgagaagggccgttacgactatgatcttttcaagaaagtggttaatagaaatctagtaagaattcctcaacagcaacctgcacctgcggagataactccaagttatgctttggggaaagtccttcaagacgctgctaagattcaaaaacaacagaaggactcatttatagcgcaagaccatatattgtttgctctattcaatgattcgtctattcagcaaatatttaaggaagctcaagtagatattgaggccatcaagcaacaagctcttgaacttcgtggtaacactagaattgactctcgtggcgctgatacgaacacacctttggaatatttatcaaagtacgccattgatatgactgagcaggctcgtcaaggtaaacttgaccctgtcatcggccgtgaagaagaaataagaagcactattagagttttagcaagaagaattaagtccaacccatgtttaattggtgagccaggtatcggtaagaccgctattattgaaggtgttgctcaaagaatcattgacgatgacgttcccactatcttacaaggcgctaaattgttcagtctagatttggccgcattaaccgcaggtgctaaatacaaaggtgatttcgaagaaagattcaaaggtgttttgaaggaaatcgaagaatcaaagactctaattgtgttattcattgatgaaattcacatgttaatgggtaatggtaaggacgacgctgctaacatcttgaagccagctttgtccagaggccaattgaaggtcatcggtgccaccaccaataacgaatatagatctattgtggaaaaggatggtgcctttgaaagaagattccagaaaattgaagtcgctgaaccaagtgtgagacaaacagtggccatattgagaggtctgcaaccaaagtatgaaatacatcatggtgtaaggattctggatagcgccttagtcactgctgctcaattagccaagcgttacttgccatatagaagattgccagattctgctttggatttagttgatatttcttgtgctggtgtcgccgtcgcaagagattctaagccagaagaattggattccaaggaacgtcaattgcaattgattcaagtagagataaaagctctagagagagatgaagatgccgactccaccactaaagatagattaaagttagctaggcagaaggaagcttcattgcaagaagaattggaacctctaagacaacgttacaatgaagaaaagcatggccatgaagaattgacacaagctaaaaagaaattggatgaactggaaaacaaggcccttgatgctgaacgtagatatgatactgctaccgccgctgatttaaggtacttcgccatcccagatatcaaaaagcaaatcgaaaagcttgaagatcaggttgctgaggaagagagacgtgctggtgccaactccatgatccaaaatgtggtcgattcagacaccatttctgaaacagctgcaagattgactggtatccctgttaagaagttgtcagaatctgaaaatgaaaaattgattcatatggaacgtgacttatcatctgaagtcgtgggccaaatggatgccattaaagctgtttccaatgccgttagattgtctagatcaggtttagctaatccaaggcaaccagcatccttcttatttttaggtttgtccggttccggtaaaactgaattggctaaaaaagttgctggatttttgtttaatgatgaggacatgatgatcagggtcgattgttctgaattaagcgagaagtatgcggtctctaagttgttgggtaccacggcaggttatgtcgggtacgatgaaggtggctttttaactaaccaactgcaatacaaaccatactccgttttgttattcgatgaagtagaaaaggcacatcctgatgttttgactgtcatgctacaaatgttggatgacggtagaattacttctggtcaaggtaagacgatcgactgttccaattgtattgtcatcatgacttccaatctaggtgctgaatttatcaattctcaacaaggatcaaagatccaagaatctaccaagaatttggtcatgggtgctgttaggcaacatttcagaccagaatttttgaacagaatttctagtatagtcattttcaacaagctatctagaaaagctattcataagatcgtggatattcgtttgaaggaaattgaagagagattcgagcaaaatgataaacattacaagttgaatttaactcaagaggccaaggacttcttggccaaatatggttattccgatgatatgggtgcacgtccactgaacaggttaattcaaaacgaaattttgaacaaactggcactaaggatcttaaagaatgaaatcaaggataaggaaactgtcaatgtcgtcttgaagaagggtaaatctcgtgatgaaaatgttcctgaggaagctgaagaatgtctggaagttctaccaaatcacgaagctactataggggctgacacgttaggtgatgacgataatgaggacagtatggaaattgatgatgacctagattaatttaatatagtgtgatttttaaaaactttcgaacaagaatcagtaatataatatatataattaataaaactaatggaatttgtttaattgaa

SEQ ID NO: 2132 - DNA, 948 bp, Saccharomyces cerevisiae
ttttgcactcgtacgaaagaccattttagatttttttgatttggtagtataacaaacgatcggaacaataacgtaacataatgataaacacaggaagaagcaggaattcagtactgctggcacacagattcctttcaactggaggattttggcgaggcggtacgaatggcacaatgtctcgcacaatcaacaacgtaaatcctttcaaattaaaattcataccgaagacagtgcccgcagctgcagactctgtctctccagatagtcaacgtccaggtaagaagcccttcaaattcatagtttccaatcagagcaagagtagcaaggcttctaaaagcccgaagtggtcgagctacgcattcccttcgcgtgagaccatcaaatctcatgaggaggccatcaagaagcagaataaagctatagacgagcaaatagctgctgcagtatccaagaatgactgctcttgcacagaacctcccaagaaaagaaagaggaaattgagaccaagaaaggcgctgatcaccctgagtccgaaggcaatcaagcatttaagggcactgctagctcagccggaacctaaattgattagagttagcgctagaaaccgtggatgttcaggactaacgtacgatctacaatatatcaccgagccggggaaattcgatgaggtagtagaacaagatggcgttaaaattgtcatcgattcaaaggcgttattcagcatcattggaagtgaaatggactggatcgacgacaagttggcctctaagtttgtcttcaagaatccaaactccaagggcacatgcggttgtggcgagagtttcatggtttaaaaaccttctgcaccatttttagaaaaaaagaatctacctattcacttatttattcatttacttatttatttacatatttatcatacatattaacattgaaccctccatcgtggta

SEQ ID NO: 2133 - DNA, 2062 bp, Saccharomyces cerevisiae
cttgcaacgagatcatatactaaatatcgggaactctttatttctggatcttttatcagtcacttttttttttagtcaaagaagcaagagaaaactagacagagacaatgtcggatcattctcccatttctaataaggaaaatcatctgctgccatcagactcgtcaagaagctcatccagcgatatgcattcgacgggcaccacgggaaccacaggcgtcgaacctgtagatttcaccggtgaaggtgccaaatacacaactgctacggagggcaatggtggtgcagatttagcgattcaaagaacgacgactatgaattctgctgcagaatcagaggttaatatcacgagaagattaactaaaatccttactgggtctgttaacgagcctgaccgtgtagaggttgattataccaattgtgcgcccatgggtggtgacagaccttaccctccatcgttgccgagcagagacctgtacgaggttacttttgatggtcctaacgacccactacatccatttaactggcccatgaagaagaaagtgctgctatgtctggtcttatgtctggattctattgccattgctatgtgttcttccatttttgcctctgcagtgccgcaaatctgcgagatataccacgtcatcgaagttgtcgccattttgggtatcacgctttttgttcttgggtttgcggcctcaccggttatctatgctcctctttctgaattgtacggtagaaagggtgttctggttttatctgcgtttggatttgcccttttccaatttgctgtcgctactgctgagaacctgcaaactattttcatatgtagattctttggtggttttatcggggcagcacccatggccgtcgtccccgccgcgtttgccgacatgtttgatactaatgttagaggtaaagccattgcgctattttctctaggtgtttttgtaggccccattttatcgcctgtcatgggttcttatatcgcacaaagaactacctggagatggttagaatatgttgtcggttgtttcgcttccgcagttttcgttgccatcgtattgttctttgaagaaacacatcaccctaccattttggttaacaaggccaaacagatgagaaagcaaagtaataactggggtattcatgctgctcatgaagacgtggagctatccatcaaagacattgtccaaaaaactgtgacgaggcctatcattatgcttttcgtggaaccattgctactattcgtgactatttacaactcttttgtctacggtatcttgtatttgttactggaagcctacccacttgtctttgtggagggttatgggtttactgaaaacggtgagttgccatacatcgccttgattatcggtatgatggtgtgtgctgctttcatttggtatatggacaacgattatttgaaaagatgtagagccaaggggaaattagtgcccgaggccagattgtacgcaatggtcattgcaggtaccgttttccctattggtatcttatggttctgttggacgggctactatcctcacaagattcattggatggtccccacagtaggaggggccttcatcgggttcggtttaatgggtattttcttgccatgtttaaactatatcattgaatcgtatctattgttggcagcttctgccgtcgcagcaaacactttcatgaggtctgcatttggtgcatgcttcccattgtttgcaggatatatgttccgtggcatgggtatcggttgggctggtttgttattaggtctatttgccgctgcgatgattcccgtgcctttactattcttaaaatatggtgaatctatcagaaagaaatccaagtatgcttacgccgcttaagaaaaagaaaagcagaaatcatgctctttctatatttgcatttttttatttcattgttattactcaccctgccccacgctcaaagggctcgataacgacatagcattatagacactgtgcagcgtaaagctgacatataaagaaattacaaaaaaaaattaaaaaaaaaaaaaaaaacaatcaaaaaagacaca

SEQ ID NO: 2134 - DNA, 2475 bp, Saccharomyces cerevisiae
caatatttacaaatacaggaaaggcaggaagcactggcaaaaagactgcatagctaaaaaaaaaaagaataaaaaaaaaacggagacctcaacagagcgaaaccaataattacaaacaaaatcttcatatgacttcgaaaccatccaccagtgacggcagggctcactcgatttcccatgtacctggcacgcacatgagaggaacatcggcatcacacagccccagaccgtttaggccatgtgcggattgtacgtgttctccaggcttactgtctaggcaaggtcgtagagcctctctatttttaagacagttagaaaattcaaggaggtcctccagcatgcttctcaacgagttgaagggcgctggcggaggtagcagtgctggaaatgggtctgtttactcatgtgactctctatgcgctgttaacagggaagttaacactactgatagattgttgaagttgcgtcaggagatgaagaaacacgatttgtgttgttatattgtgcccagttgtgacgaacatcagtccgaatatgtatcattgcgagatcaaaggcgcgccttcatttcagggttttccggatcggccggtgtagcctgtatcaccagagacttgttaaatttcaacgatgaccatccggatgggaaatccattttgagtactgatggaagatatttcaatcaagctagacaagaactagattataattggacacttttgaggcaaaacgaagacccaatcacttggcaagaatggtgtgtcagagaagctttggaaatggccaagggacttggcaataaagagggaatggtgttgaagataggtattgacccaaaacttatcactttcaacgactatgtttcttttagaaaaatgattgacactaaatatgacgcaaagggtaaagtggagctggttcccgtggaggaaaacttagttgacagtatttggcctgattttgaaactctacctgaaaggccttgtaacgatttactactgttaaaatacgagtttcatggtgaagaattcaaagacaagaaggaaaagttactgaaaaagctgaatgataaggcttcctctgcgacgaccggtaggaatactttcatagtagttgcgttggatgaaatttgttggttgttgaacttgcgtggatccgacattgactataatccagtttttttctcctacgtggctattaacgaagacgaaaccattcttttcaccaataaccccttcaatgatgacatatcggaatattttaagataaacggtattgaagtcagaccttacgaacagatatgggaacatttaacaaagataacttcgcaggcttcttctgcggagcatgaatttttgattcctgatagtgcatcgtggcagatggttcgttgtttgaacacctcaaccaacgctaacggtgcaatagctaaaaaaatgactgcacaaaactttgcgataattcactcacccatcgatgttttgaaatctatcaagaatgacatcgaaataaaaaacgcacacaaggcgcaggtcaaagacgcagtatgtttagtgcagtattttgcatggctggagcagcaattagtggggcgcgaggcactgatagatgaatatcgtgccgcagaaaaattgaccgagattaggaaaacccaaaggaacttcatgggcaattccttcgaaacaatatcctccacaggtagtaacgccgccatcatacattattcgccgcccgtagagaactcttcgatgattgatcctaccaagatatatctttgcgactccggttcgcaattcttggagggtacaactgatataacaagaacaattcacttaacaaagccaaccaaagaagaaatggataattacacactggtacttaaaggtggcttagccctagagaggttgatttttcccgaaaacactcccgggtttaatatcgacgccatcgctaggcagtttttatggtcccgcgggttagattacaaacatggcacaggccatggtatcggatcatttttaaacgttcacgaaggacccatgggtgtcggctttaggccacatctgatgaatttccccttaagagcgggtaacataataagtaacgaaccaggttattataaggatggtgagtatggtatcaggattgaaagcgacatgttaatcaagaaggccactgagaagggtaacttcttgaaattcgaaaacatgactgtggttccctattgcaggaagttgatcaatactaagttactaaacgaagaagaaaaaacacagattaacgagtaccacgcaagggtatggaggacaatagtgcattttctgcagcctcagagtatttcatacaagtggctgaaaagagaaacaagcccactatgacttcgaggcgagcggggcgcaatacaattaatgttagtatttattctaagtagtttctttctttttatttaatttgagtgataacaataacaacaat

SEQ ID NO: 2135 - DNA, 693 bp, Saccharomyces cerevisiae
atgcgtaagccttctattacgataacaacagcaaaagctattataactccagactatactcttattaaatcgcattctaaataccaacttccttcacgttttcaaaagctagatgcagactcacctgagagaagtacagttgttaagctattttaccgccgatttatgaggcttaagcctttcatatcgaatgtgaaaatggttaaagatacttacagggattatgttcgatataagtttatgaaagaaaactacgaactcaaacgatacttggtattcaatcctgatggcttgaggtcgaaaatcaatcttgagcttctcagcaacacgaaatgttgtgaaaggatactccccgtgactgagatgcaaagaaccttggaatttgttctgaagagctgttcatacttgcccgaaacaaaagttcaaaagtgggatattgcaagggacaacacatattgcaggcaaattttaaagaaccttttaacaatgcaatatgaaaagtacagatcgattttgcatagaggaataggccatgatgagcttgacgtcaaattctctcatttgaaaactacttctagtccgctaactaagctaaataaaaccgaaaagaaaaagattccgcttttcaaagtatttagtgatttcgatacaacattgatatatctcaatgagacattaggtacaaggttataa

SEQ ID NO: 2136 - DNA, 2189 bp, Saccharomyces cerevisiae
ctgcgcctaaggcttaggttgcatttaagttgtcttaattcacgcttatagtgcaggtagtataggttccccactcctgatctttcccttctgaaataaggaaagactgcagtttagtttggcagagagaagaagataatcatttctattatattctaccgctatggtgatagattccaaacaggatctacctcaatataccaaagattcaggttcagaatcggactcagactcaagtaataatttcattgtggaatctccgtcaattccatcttcaaaaagtgcaaccgtagttctcaatagtgaagagtatgaggacgacgaaggtgatgacttgaacgggctggatgctgaattgatcgataatataacgtatgaaggagatgaagatgaaactatgtttgtggggttgaaagaaaaacagaagttacatttatctggtgttttccggctgcaagtggtgaaaggaggtattgtctacaacaatgtacactataacgcttcgagagaaattttaaccttctggcacccgttatcacagtccatacctactatagatttttcgcactttgcaggctggcaagacactttttttatgccgagaaacaacaggtttaaaattagagatgaagaattcaaatcatttccatgtgttcttcgcgtttttaattctaatcatacgggcttgttagaagcaggtcatttatatcgggatgttaattatctatggaaacctaaagaaccttactttccattaaacgagagaacaacgtatcatttattacatgagtcagaccgaattcaatctttatccgtgccgggatattggtcaactccgttagagaagttatatttgagtcacaagaacgctgcgtatgatacaagaatcatggtgattggtggtaaaaactctgggaagtctacattcttgaggcttttattggaaaaatttacgcaagatatacgagattctactacgagccaggaagaattggtatacctggatttagatcctggtcaacctgaatactcactacctgattcaatatccctgaataagattctttccagccctatttctctcggacaacatctctgccaaggttcaaatttccaaactttgttacagttctacgctggctcctcttccccgcaggacgagcccacatcatacctgaactgcgctgataaacttatagaccatttggaagagcaagccttcttcggaacgtcattgcttaatctacctgggtggataaaaggattcgggatgcagattttaaatcatataataaggaaatataagcccactcacttattgtttttggaaacagctaattcgaaaagacacctggatgaactaacaattccacagagtttttccacatcactacgagatgcatatgcacctgaagttgttcgcgttccagcccatagtctgaaccacaccttatcttctaggttccatgcatcacaactgagaacattcaaaatactggcactgtttcataaaataactcaatttgattatgattttgcgcctcttttaaaatctgcacctttgcaaatttcatatggcaaaggtaaaagcggtattaaaggcattcaatttcctatggaattccaggatctgaatcctcaagatatcaagtccgcattggaaggtactgtcattgggatatatacatattctggagaagactcactagaggtgaaatccttgaatacctttcccatcctacaatcgtgtacttcttcttctaaaaatttcataactctggggctgatacactctattgacacctcccagcaaataatgaacatttacgtgccaccttgccatacccagattttagataaacaacctgaggatgctcaatggataatagtaagaaataagacggaaactcctttttgtgactttcttccatccccccgcacaattacatgggatgataatatacaaataccgttcgcaacttttgaaagaaggaaaaaattggaacatgtgtggaaagttcgtaagaacgtcatgagacgtggccaattcatgaaaagatagaaagaaaaggtaatcgtacattttttaatagtgaaagatagaggatacacaaaaatcatgcaaagttttatatatttgttatgtatactcatattccttcaatatctaagtcatactaacttctagg

SEQ ID NO: 2137 - DNA, 2103 bp, Saccharomyces cerevisiae
gtcccaataagcgtcggttgttcttctttattattttaccaagtacgctcgagggtacattctaatgcattaaaagacatgagtaatcctcaaaaagctctaaacgactttctgtccagtgaatctgttcatacacatgatagttctaggaaacaatctaataagcagtcatccgacgaaggacgctcttcatcacaaccttcacatcatcactctggtggtactaacaacaataataacaataataataataataataacagtaacaacaacaacaacggcaacgatgggggaaatgatgacgactatgattatgaaatgcaagattatagaccttctccgcaaagtgcgcggcctactcccacgtatgttccacaatattctgtagaaagtgggactgctttcccgattcaagaggttattcctagcgcatacattaacacacaagatataaaccataaagataacggtccgccgagtgcaagcagtaatagagcattcaggcctagagggcagaccacagtgtcggccaacgtgcttaacattgaagatttttacaaaaatgcagacgatgcgcataccatcccggagtcacatttatcgagaaggagaagtaggtcgagggctacgagtaatgctgggcacagtgccaatacaggcgccacgaatggcaggactactggtgcccaaactaatatggaaagcaatgaatcaccacgtaacgtccccattatggtgaagccaaagacattataccagaaccctcaaacacctacagtcttgccctccacataccatccaattaataaatggtcttccgtcaaaaacacttatttgaaggaatttttagccgagtttatgggaacaatggttatgattattttcggtagtgctgttgtttgtcaggtcaatgttgctgggaaaatacagcaggacaatttcaacgtggctttggataaccttaacgttaccgggtcttctgcagaaacgatagacgctatgaagagtttaacatccttggtttcatccgttgcgggcggtacctttgatgatgtggcattgggctgggctgctgccgtggtgatgggctatttctgcgctggtggtagtgccatctcaggtgctcatttgaatccgtctattacattagccaatttggtgtatagaggttttcccctgaagaaagttccttattactttgctggacaattgatcggtgccttcacaggcgctttgatcttgtttatttggtacaaaagggtgttacaagaggcatatagcgattggtggatgaatgaaagtgttgcgggaatgttttgcgtttttccaaagccttatctaagttcaggacggcaatttttttccgaatttttatgtggagctatgttacaagcaggaacatttgcgctgaccgatccttatacgtgtttgtcctctgatgttttcccattgatgatgtttattttgattttcattatcaatgcttccatggcttatcagacaggtacagcaatgaatttggctcgtgatctgggcccacgtcttgcactatatgcagttggatttgatcataaaatgctttgggtgcatcatcatcatttcttttgggttcccatggtaggcccatttattggtgcgttaatgggggggttggtttacgatgtctgtatttatcagggtcatgaatctccagtcaactggtctttaccagtttataaggaaatgattatgagagcctggtttagaaggcctggttggaagaagagaaatagagcaagaagaacatcggacctgagtgacttctcatacaataacgatgatgatgaggaatttggagaaagaatggctcttcaaaagacaaagaccaagtcatctatttcagacaacgaaaatgaagcaggagaaaagaaagtgcaatttaaatctgttcagcgcggcaaaagaacgtttggtggtataccaacaattcttgaagaagaagattccattgaaactgcttcgctaggtgcgacgacgactgattctattgggttatccgacacatcatcagaagattcgcattatggtaatgctaagaaggtaacatgagaaaacagacaagaa

SEQ ID NO: 2138 - DNA, 657 bp, Saccharomyces cerevisiae
aggccattagcctctaccaaaggaagtttgatgcctggtcttaagcttgttgaagctttagaatacaggtgtgaccgattggagcggcttataggcgccggatacagcgcgaattccgatgtttcagtgcaattagatgaactatacaatcagttacatcgtctatatttccagggtctaaagtattctcaagatctcctgcaactctttaatactttcatggctgaagacatcgagaacgtgggagctcctgatgatatttgtatttttgctagttgctttgacgatatttatacattatatagtgcatttgacgaactaaacagccaatatatggagttttgccaaatcagtaaaagttcattggatcagatttccttcaaagacgcaaatattgaaacgaaacagttgaagaagttacccgagttggtggataactgcaacataatgattttgaggtcaattgcaattctaaaccgtttcatcgactggaatattgaagttaacggattcttccagttccagaaaaagaggctgttgaatttacaaaaggtaatttatagtacgtgaacatgtgtgcgtatatacatatatatatatatatatatatatatatatatatatatactttagcatcgaaacagctagtccttttta

SEQ ID NO: 2139 - DNA, 1848 bp, Saccharomyces cerevisiae
aaccaccactgaacaactattaatcatcgtggaaattattatgacggaaattgaatttgggcaaccccttcccagcaatctagactatgctgtttcttttggcattcctacatgggattcggcaataggctatgcggaaaaggtgccagaggtaataggcaaaatggctacaggatatccgaggtactttcctcaaccccccgtccagaggctttgtgcttactttgttaagaaatttgggcgaggttcagaaaactgtcgtccttttccatccgttaacctgggtttaaagtgtttcgagtacgtaaaatctgtctcaggacctgaaagtaaagctcaccttgaagtggaaacagttacgattaaaaaccgtggggcaaaaacgtcgaaagaaccggcggaattggtgctaaccattgctgctgtccttgcatcggaggaagagttcgagactgtgaaagagtattggaaattaagaggtgaatgtgtatctagtcgattggcgttgtctgtcaaccaacttcttgactgcgctaatcatggctcagagcaggtattgcgtgagctagaggctggtgtttttgcagcaaagaagggggaggagaaagcaaagaacctgataaagggaaggatagttgagaatcgcttcaggccctttggtttggagaagaaaaccccgaattgggagggactcaacctcaacccaaatgaagacgtttatcttgtatcaagtggcatgtctgcaatatctacggctcgtaatttactcaccttttgggaggagaagaagaattcaggagattcattaaacaagaccacctctgaccaaaagaaaaagccattattatgtgacactgttggcatcttcggcttccctttcaaagatacgcaggtcattatgactaaatttggaaaatgtaaattttttggatttggaaattctagagacgttgtcgaattacaaaagtttttagaaacaagcaaacaacgcattcttgccgttttcgtcgagacaccttcaaatcctctgctgaatatgccggatttgaaaaaattgaggagtttggccgaccagtatggcttttttattgtaattgatgatactattgggggccttaacgttgacatcttgccctatgctgatatagtcagcacgtccctgactaagcttttcaatggtgctagtaatgtaatgggcggctctgtcgttttaaatccgaaatcatctctgtatccatatgctcgtgagtacttcaggagcgctaatttcgaggatttgttatggtgtgaagatgcgatagttttagaacgtaattccagggattttgaagatagaactttacgtgctaatgcaaacacaggaatattgttgaatgatttgcttttacccgaggaggggaaaatatgcaaaaagatttattatccaactgttacttctaaggagacctttgagaactacgaaagtgtacgtaatgaacgtggtggctatggatgcttgttctctgtagcctttttcaatgagggcgatgcaaaagcattctatgactctttaaaggtattcaagggaccttctaatggtactaactttaccttagcatgtccatatgtccatctggcgcaccactcagaattagaagaagtttccaagtttggggccgaccccaacattattagagtaagcgtaggtttagaagatatccagtggttattgaaagttttttcaagtgctttagatgttgtgaaaagcagaggctccaaacactcatgaagcagatcatgagtagaatatcaaaaatcaagaattctttataatctttatagaatattgtttataaaagtttttttcca

SEQ ID NO: 2140 - DNA, 1814 bp, Saccharomyces cerevisiae
aagatacccgaaatggatgaatttgaatctaccaaactttcgaaggttcagttttccactagcgtgttaagtacgccttcgaatgaaggaaataatctaatacacagattcaagaactctttcaagcgaaatgattcaccagcgatccaagaaggtttgctgtattcggagctttcagaggaagaaaaaatacaatgggacttagccaaccagccgtataaaaaggtcctagatcaaagacacctgaccatgatagccattggaggtactctagggacgggtcttttcattggtttaggggaatcactagcgtccggacctgcttctttgctaattggtttcttgttggtcggcgcatctatgctctgtgttgttcagtgtggggccgaactttcatgtcagtaccctgtttccggctcctatgcgctgcacgccagtagatttatagacccatcagtcggcttcagtataggaattaactacttattgatgtggctcatatcttaccctagcgagctggtaggatgttcgcttaccatctcttattgggcaccatcggtcaatcctgctgcctgggttgcaatcgcgttcgttttaagcatgctattgaatctttttggggcaagaggctttgcagaatcagagttttatatgtcaattttcaaaattgtggctctattcatttttataattattggtattgttctcattgcaggtggtgggcctgattctactggatacatcggcacgaagtattggcacgatccaggctccttcgctgttcctgttttcaaaaacctctgcaatacttttgtttcggcagcatactcctttagtggtacagaaatggttgttttaaccagcactgaagcaaggagtgtttcctcagtctctcgggcagcgaaaggtacgttctggagaattatcatcttttatattgttacagtgattataattggttgcctggtcccttataatgatcctcgtctgattagcggttcatccagtgaggatattactgcttccccgtttgttattgccttgagcaatactggtgctatgggaacaagagtgtctcattttatgaatgcggtcatcttgatagccgtattttctgtttgcaattcctgcgtttacgcatcctctagattgattcagggtttggcgacagcaggccaacttccaaagatctgcgcttacatggacaggaatggtcggcctttagttggcatggctatatgtggcgcttttggattgttaggctttttggttgtttccaagaaccagggtacagttttcacatggttgtttgcgttgtgttccatttcatttttcacaacttggttctgtatttgcttctgtcaagtcagatttaggatggcaatgaaagctcaaggaaggtcaaaggatgacattatctatagatcgacattagggatatacggaggaattttcggctgtatcttaaatgttctattggtaattggagaaatatatgtatcggctgcacccgtgggtagtcccagttctgctgctaatttctttgaatattgtatgagtattcccataatgattgctgtatatattggccatagaatttaccgcagagactggagacactggtacatcaagcggatggatattgacctcgatagcggacattcgttagaggacttcgaagccaccaagcttgagagggatgaggataagaaatacgtttcctctaagccactttactataggatctatcggtttttctgttaacttagtgaagtacttcatttgaatattaattaataataattttatgagcc

SEQ ID NO: 2141 - DNA, 1658 bp, Saccharomyces cerevisiae
attgcgtgtgtgcggaaggattgtgcagtagaatggctcctgtagttatttcagaatctgaagaggatgaggatagagttgccattactagaagaactaagagacaagttcattttgatggcgagggagatgatcgtgtagaccaacagcaacagcagcacagttcaagccacagggatagggataaacatgtgcagcgtaagaagaagaaaaggctctcgaatagaaacctgcaaggttcaaatggtgggtacgcttgggaggatgagatcaagagaagttgggatttggtgaaagtggacgatgaaggggatatggcatctcttgtggctagcatagtcgaggccagaaagaaacgtactgctaagaaaaacataacgccataccaaagaggtattatcagaagtttaatattaacactagattgtagtgaagctatgttggaaaaggatttgagaccaaacaggcatgccatgattatccagtacgccatagattttgtccatgaatttttcgaccaaaatccgatatctcaaatgggtattatcataatgagaaacggtttggcacaactggtcagccaagttagcggaaacccgcaggatcacattgatgcgttgaaatccatcaggaaacaagaaccgaaaggaaacccttcattgcaaaatgcattggaaatggcaagaggccttttattgcctgttcctgcgcattgtacaagggaagtactgattgtatttggtagtctttccacaactgatcctggagatattcaccaaactatcgattcgttagtttctgagaaaattagagtgaaggttttggggttatcagctcaagtggccatatgtaaagaattatgcaaggcaacgaattatggtgatgaatccttctataaaattttactcgatgaaactcacttaaaggagctatttaacgaggctgttacccctttacccgttaacaaaattaataagggtttcacactcgtaaagatggggtttccgacaaggatattcgaagatactccaactttttgttcgtgccattccaagttagtttacggcggatacttctgtcccaattgtcatagtaaagtttgttcattgcccacagtctgtccatgttgtgacttgatgctaatcctttctacccacctggccagatcatatcaccatctgatgccgttaaaaacatttgcagaagtacctacaacagaaaaatttcgatcagaagactgctttagttgccagtcaagatttcccatactgaaaaaccataaaaatggtaaactactgacaagttctcgctatcgttgtgaagattgtaaacaagaattttgtgttgactgcgatgtgttcatccatgaaatccttcataactgcccaggctgtgaatccaagcccgtaataacttaacgaaaatctgtcagcgtataacacgatcactcttccatcatataacaaatccaagtagtagagaacgaaatagtttttgatggacatataactacataattattacaaaaataacctcatttaatgtcctattgtttattacgagaaaatcttaatagcacttacggcattaagaatatttattactattttcaatttatcaggcacttattcaactaaaaaaaaaaaaaaaattctttg

SEQ ID NO: 2142 - DNA, 1077 bp, Saccharomyces cerevisiae
aatggaggtacatgaagagcaggtctctgcacctgtaacaggggatgctacagcaaaatatctgctgcaatatatcttgtcagcaagaggcatttgccatgaaaatgctctcattctagccctaatgagattggaaaccgatgcttcaacgcttaacactgaatggtcgatccagcagtgggtcgacaagctaaatgattatataaacgctataaacgtaaaactgaaccttttgggttacaagatcattcggatcaaccacgggattggtagaaacgcagtgactttaaaggccaagcagaattttgagtccttcgaagataatacagcaataagggctcacaataatgattatgcagttttgcaatcgatagtacttccggagagtaacaggtttttcgtatatgttaacttagcatcaacagaagagactaagttagccacaaggtttaaccaaaacgagatcgagtttatgaaatgggccatagaacaattcatgatcagtggagagactatcgttgaagggcctgcactggaaacctcgataattgtgaaggaagtcaaccgtattctagtagcagctacaggagactcaaacctcgcgaaatggcgtaagttcagtacgtttactgtagggtccaccaatcttttccaatttcaagaattaacagcaacggacatcgaagacttactactccgattatgcgaactgaaatggttttacaggactcaggaagggaaattcggtattgatcttcgctgtatagcagaactagaagagtatctaacatccatgtacaatttgaacacttgccaaaattgccacaagctggcaattcaaggtgtcaggtgcggcaacgaatcatgccgagaagagaatgaggaaactggagagaatagtctgtctcaaatttggcatgttgattgtttcaagcattatattacccatgtaagcaagaattgtgatcgttgcggttcatcgctaatcacagagggcgtatacgttatttaaactaaaatacatagctttccgtgttatttacaagacttatctatacaaacatttgattgcccgaa

SEQ ID NO: 2143 - DNA, 912 bp, Saccharomyces cerevisiae
ccaacttacatcagtttctatcttgatccgtgatataccacttttaagttcttcgacttgtgatttgaaagatattgctattcaagcgtgagttgtccatattgttaccaccacctccccgtgatttacattcagaaactaaaaggaaaaggaagtagaagtttagtaagtataaaaaaatgagaatttatcaatgccatttttgctcatccccatgttatccaggtcatgggatcatgtttgtgcgtaacgatgctaaagagtttaggttctgccgttctaagtgtcacaaggcattcaagcaacgtcgtaacccaagaaaactaaaatggaccaaagctttcagaaaggctgccggaaaagaattggctgtggattctaccttgacttttgcccaaagaagaaatgtccctgttagatacaatagagagttagttgccacaactttgaaggctatggctagaatcgaagaaattagacaaaaacgtgaaagagccttctacaagaatagaatgagaggtaacaaagaaaaggacttcttaagagataagaaattggtcgaatctaacccagaattattgagaatcagagaagttgaaattgccagaaagttggctaaagaacaagaaagagctgaatcagtatccgaacaagaggaatctgaagaagaagaggaggatatggaaatcgacagtgacgaggaagaggaagaacaattggaaaagcaaaagattctgctaaagaacagaagaagaaatacaaagaaaattgctttttagttagaacagaaccgggctaattgcctctttcctttcttttctcatacttatttcatgggataaataagaatcacctgtatactattatttacattacataacattacaataactattttcaagggtcctctta

SEQ ID NO: 2144 - DNA, 1130 bp, Saccharomyces cerevisiae
atgaaaaaaaactatttcgagatgagatgagattaaatgaacaggattaagaatacattttctgttgctaagagattaaaactaagcaaagttatgacgaactcagaattaccgagcatattcgaaggaactgttgatttagggattattggtggtacaggtttatataaccttgactgtctggagcccatcgctttgcttccacccatggtaacaccatggggtaccacatcgtctcctgtcacaatctctcagttcgtaggaactaacagccactttcacgttgcgttcatagccagacacggtattaaccacgaatacccacccactaaagtcccatttagagcaaacatggcggccttaaagaacttaaattgtaaagccgttctttcttttagtgccgtggggtctttacaaccccatataaagcctagagattttgtgttaccacagcaaataatcgacagaactaaaggcataagacattcttcatatttcaacgatgaaggcttggtaggtcacgttggtttcggacagccgttctctcaaaaattcgcagagtatatctatcaattcaagaacgagataacaaatcctgaatccgaagaaccgtgccatttgcattacgacaaggatatgaccgttgtgtgtatggaaggcccacaattctccacgcgcgctgaatccaagatgtacagaatgtttggtggccatgttattaacatgagtgttattccagaagccaaattggcgcgtgagtgtgagctgccttaccagatgatttgtatgtctaccgattacgacgcatggagagatgaggcagaacctgttaccgtagaaaccgttattggtaatttgacgaataatgggcgcaatgcaaatattttagcttctaagatcatcgtctcaatggccaaggaaatcccagagttcatgcatactggcgatgggctgcgcggttccatcaagaaatctatctctaccaaaccagaggctatgtccaaggaaaccttagaaagactaagatacttatttccaaactattggtaatggttgccgctaatcatatgtaaaatataaataggagagaaaacatatatagctatggaaagtattaaatgtttttttgc

SEQ ID NO: 2145 - DNA, 1422 bp, Saccharomyces cerevisiae
taaaagaaacccacgaagcatcgcttaatttacacatattcttcgttctccccttttggagaggatttaagctaagatatatctttcttcgagcgcagtgctgcttttgagttctttcgttttaattttccacttatttggcaataaaaactgagtgaagagtgcttctctgtctgttttagggagctttttcagatcatcatcagatgggatttatagcaaatatactgtgctgttcttcagatacttccaaaacacatcgtcaacgccaaccaccagaaactaatcacaaccgcaaccgcaaccgtaagcacagttcaaacaaagctcaaactcagggtcgtaagcagaaggctactccaaacggcgacaagatgcaatattccacaccggagatccttttgtctagttccgattcaggcagcaatgcgggttccaagacaatgcaggagaatgggaatagcggcaatggaaaactagcacctttatcaagagatcactccaacaactcgtacgatgaggagaaagaatatgaagattataatgaaggagacgtagaaatgacggaggttaacaatgccggagaagaagaagaagaagatgacgaagcaaaagaaaagcaagaccatgtcgttcatgaatataacgttgacgcagatagaaattccagtattaatgacgaggcgccaccacaacagggtctgtatcaggtgggtcaagaagatatgaatccacaatatgtcgccagcagtcctgataatgatttaaacttgatacctacaacggaggaggacttctctgacctgacgcatttgcaaccagaccagtaccatgcccccggatacgacactctgctaccacccaagttgcaagaatttcaacagaaaaaatgtctgatattggatctagacgaaactttggtacattcttcctttaaatatatgcattcagctgatttcgttttgcccgtcgaaatcgatgatcaagttcacaatgtctatgttattaagaggccaggcgtcgatgagttcttgaacagggtgagtcaactatacgaagttgttgtgttcacggcaagtgtttcgaggtatgcaaacccccttttagatacgttggaccctaatggaaccatccatcatcgattattcagagaagcttgttataactacgaaggtaactacatcaagaacttatcgcagatcggaagaccattgtccgaaacaatcatcttagataattcgccggcctcttacatctttcatccgcaacatgctgttccgatatcttcttggttctctgatactcatgataatgagttactagatattatcccacttttggaggacctttcatcaggaaacgtgttggatgtggggagcgtgttggatgtgacgatatagatttctcagtaacataaaaagc

SEQ ID NO: 2146 - DNA, 615 bp, Saccharomyces cerevisiae
aaaaagaatgggctatttttgtacaaaatactgttgcaaatatgatatcatatgaattccaaactcatctaccgaaaggaaaagatagctcattgaacgcttcatccgaaaacaaagaattgtatgtacaagccacgcactttaataacacaattctattgcaaatcagactaaatggggaaatggattccacctatgaggtatcttcaaaaggactaaacccaattctcgatatcaacgtaccactggcaggaaacctaggaaacacgggtggcgattatgacgatgaggaagaagaatttgtaagagaccatttatctgattatcaagtggttaccaagttgggagatagtgccgatcctaaagtacccgtggtatgcgtacagattgccgaactatataggagagttattctaccagaagtgagcggtacgatggcccaagacaacatgcaattcagcttgctgatatccatgagcagtaagatatggagagcaacgaaggaacaaagcgctgacgataatgattttggcaaattagtttttgtgttaaagtgtatcaaagatatgtatgcaaagtgattctatataaattagttatgcgttgtattatcta

SEQ ID NO: 2147 - DNA, 1176 bp, Saccharomyces cerevisiae
gaggagctggaaagatggaatggaaggactgcaacactcagtaagaaggttcgtggtagggaacatcaccttctctagttcctgtaaaaataatatgatcaagtttgaatcctcgtattgaaaaatcgcgagttattaagtgtgtaatttagaataccgaaatagcacaagaagagataagataagatactgataggataatgtctttaccagctacttttgatttgactccagaggatgcccaacttttgttggccgctaacacccatttaggtgctagaaacgttcaagtccaccaagaaccatacgttttcaatgctagaccagatggtgttcacgttatcaatgttggtaagacctgggaaaagttggttttggctgctagaattattgctgccattccaaacccagaagatgttgttgccatctcttccagaacctacggtcaaagagctgtcttgaaatttgctgctcacactggtgctactccaatcgccggtagattcactccaggttctttcactaattacatcacccgttctttcaaggaaccaagattggttattgttaccgacccaagattagacgctcaggccattaaggaagcttcttacgttaacattccagtcattgctttgactgatttggactccccatctgaatttgttgatgtcgccatcccatgtaacaacagaggtaagcactccatcggtttaatctggtacttgttggctagagaagttttgagactaagaggtgctttggtcgacagaactcaaccatggtccatcatgccagatttgtacttctacagaaacccagaagaagttgagcaagttgctgaagaagctgctgccgctgaagaaggtgaagaagaagaagttaaggaagaagtcactgaaggtcaagctgaagctactgaatgggctgaagaaaatgcagacaacgttgaatggtaatcatttgaaaaccttgcaatgtgtgtgaatattgtaaggaattgagaaagagagataaaaaaagagacagaagtatcacttccttttctaatttttctttttcattttttttttaaattcatctatcgtttatctttatctcatatatatttgcttctctctgaagcgtcatcatctatctgtatttttaatgcaatcatagtataaaaatttttaa

SEQ ID NO: 2148 - DNA, 906 bp, Saccharomyces cerevisiae
ctgacatagctgtcttcaatggaatcataacaatgaagttcgaagacctcttggcaaccaataaacaggtgcagtttgctcatgcagctactcaacattacaaaagtgtcaaaactccagatttcttggagaaagacccacatcacaaaaaatttcataacgcagatggcttgaatcaacaaggttcttcgaccccatctacagctaccgatgcaaatgccgcctcaactgcttccactcacacaaacaccacgacattcaaaagacacattgttgccgtggatgacatatcgaaaatgaactatgaaatgataaagaattctccagggaatgtaataacgaacgctaaccaagatgagatagatataagcaccctcaagacaaggttgtacaaggacaatctttacgctatgaatgacaactttttacaagctgtcaatgaccaaattgtaacattaaatgcagcggagcaggaccaagaaactgaggaccctgacttatcagatgatgaaaaaattgatatactgaccaaaatccaagagaacttgcttgaagagtaccaaaaactttcacagaaagaaagaaagtggtttatattgaaagaactactgttggatgcaaatgtagaactcgatttgttcagtaatcgtggcaggaaggcaagccatccaatcgcattcggagcagtagccataccaacgaacgtcaatgcgaattcactagcatttaacagaaccaagagaagaaaaattaataagaacggccttttggaaaacattctttaagccaagattaacataagacaagtttgcaaaatccccaacttcacttccatatgcatattcatttaggtatatatcgtatatttgagaaaaattcatatatgaaacgttattaaaacatgaa

SEQ ID NO: 2149 - DNA, 1282 bp, Saccharomyces cerevisiae
aggtcagtttgttgcatttgtaaaaaaagataataagaaaaatattcgtctagatttgagatatggatttggtcttagaagtcgctgaccattatgtcttagacgacttgtacgctaaagttctgcccgcttcgttggcagctaatattcctgtcaagtggcagaaattgctagggttgaacagtgggttcagcaattctacgattttgcaggagactttgaactccaagaatgccgtcaaagaatgtagaaggttctacgggcaggtgccattcctgtttgatatgtcgacgacgtcttttgcatcgctattgcctcgttccagcatcttgagagaattcctctcactatgggttattgttacgatctttggtttactactttacttattcacggctagtctcagctacgtgtttgtgtttgacaagtcgattttcaaccatcctcgttacttgaaaaaccaaatggcaatggaaatcaagttggcagtcagtgctatcccatggatgtcgatgttgaccgttccatggtttgttatggaattgaacggccattctaaactatacatgaagattgattatgaaaaccacggtgtaaggaagctcattatcgagtacttcactttcatctttttcactgattgcggtgtgtatttagcgcacagatggttgcattggccaagggtctaccgtgctctgcacaagcctcatcacaagtggctggtctgcacacctttcgcatctcattctttccatcctgtagacgggtttttgcaatccatctcgtaccacatctacccattgattctgccattacacaaggtttcttatttgattctgttcacttttgttaacttttggactgttatgattcatgacggtcaatacctatcaaacaatcctgccgtcaacggtactgcctgccacacggttcaccatctatatttcaactacaactacggtcaattcaccactctgtgggacagactagggggttcttaccgtagaccagatgactcattgtttgatcctaagttaagagatgctaaggagacctgggacgctcaagttaaggaagttgaacatttcatcaaggaggtcgaaggtgatgataatgatagaatctatgaaaacgacccaaataccaagaagaacaactgaatacggttgccttgtttgtctcatcttttttctttctttcacgttcaagaactttcacacaacgaataacgtttatatatttatatacacatacatgttttaagatacgcatatcattatga

SEQ ID NO: 2150 - DNA, 2082 bp, Saccharomyces cerevisiae
aagtacatcttcttgattatttatcacgacacacgaggtgaccgattattcagaatcggtaccaaaaaagaaagaaaattgaaggaaatgaaaaattttcaatgtatttctcgaaagcctggagttgatcaaatgttcaaaaaatagggcagaatagcataacacacatcaataacaccgagccagcatgcctaccgtctccgtgaacaagcagcaattatttgatcttctaggcaaaaactacacttcccaagagttcgatgaattatgttttgaattcggtatggaaatggacgaagacaccacagaggaggccttgaaaaccggggaggagccggaattgaagcttgatatcagtgccaatcgttacgatttgctttgtatcgaaggtatttcacagtcgctgaacgaatacttggaacgtaaagaaagacctgactataaattaagcaagccaaccactaagttgatcatcgacaaatcaacggagcaaattagaccttttgctaccgctgctgtattgagaaatatcaagcttaacgaaaaatcttacgcttcttttattgccttgcaagataaattacatgccaatctatgtagaaacagaagcttggttgccatgggtactcacgatttagattcaattgaaggtccattccattacagagctctaccaccaaaggacatcaagttcgtaccattgaatcaaacccaagagtttactggtgacaaattgatcgagttttataaatctccagaacagaaaaacaacatagggagatacgttcacattattgaggattctccagtcttcccagttattatggacagcaaagatcgtgtttgctccctgccaccattaatcaatagtgaacattcgaagatctctgtgaacacccgtaacattttgattgatataaccgccaccgataagaccaaagccgagatcgttttgaacatattaactacaatgttctcacgttattgtgacgaaccattcacggttgagcctgtagaaattgtctctgaacacaatggccaatcccgtttggcgccaaacttcaacgatagaattatggatgtctccattaagtacatcaactcctgtcttggcctagatcaatccgctgatgaaattgctcattgtctaaagaagatgtcgttgcatgccgttcaatcaaaggaagacaaggacatcttgcacgttgacattccggtaactagacctgatattttgcacgcttgtgatataatggaagatgccgctgtcggttatggtttcaataatttgccaaagggtgagaaattatccaatgccaacttcattgccaaaccattaccaatcaacaaggtttctgatattttcagagttgcatcctctcaagccacgtgggttgaggttttaccattgaccttatgttcgcacgatgaaaactttaaatttctaagacaatccgacaatggtgatttagctgtcaaattggccaacccaaagactttggaataccaagttgttagaaccactttattgcctggtatcttaaagacagtcaaggaaaacagaaaacattccttgccaatcaaagtctttgaaaccggtgacgttgtatttaaagacgacaaactagaaaggaaggcgtacaatgaacgtcactgggctgccatctacgtgggtaagaattctgggtttgaaatcattcaagggttattgggtaaaatcatgcaaacttttagaacagagtggattgcagactacggtgctgctgcttctggcagaggttactggattgaagaagacgattctgtgaaaacctacttcccaggtagaggtgccaaggtcatgttcagatccaaagaaggcgctgagccaaagcaaatcggccacttgggtgtcttgcatcctgaagtcatgatgaatttcgacgttccattcgctgcatcctttgtagaggttaatgccgaagtcttcctataatgtaatgttctaacaaaaatttttactgatttataaaacttatatagatagatagacacatatatatatctatatatagaaacacaactaaagtttaccatgtttta

SEQ ID NO: 2151 - DNA, 950 bp, Saccharomyces cerevisiae
ctcatttcgaataattgtaaaaaaaaattagcacaaaacaatatgaccgttcccaggaatcgtcccatggcaccatttggcaccattatcaaatcaagaataaaacaaccccagttttattggtttataggccattttttaaccatctttaactttatacaatttcatctttcaatcacgtccaaacaaaaccaattgtcatgctatagaagatcattattttacatatccgttacatatgccatcgttctttaccagtttttcaaaagtgaccagttaaagttcaattttacgcttttgcgccaagagatgaagaaattggataatttgcagtattttgccatgctattcatactttttctcttatcacagtttaacatcataatcagcggctcgttatacagtcccgttatcttttcaatctttcacttcctgaactattttaaggaaaaccttttgccatttttgcctttgataccacttaatttgaaaaatttgttgaactccaaaataacggtattcatccaaaactacaatggatttttcttacagatggcgcaagtatttgagattatctgcggcctacgtgtgggcctcttcttagtgcccttcaattttttcttgttgttggtaagaagagcaaacgtgtcgtttgaggtagtgggtacaatgttggcaggactaacctatgtatggtttttcaaattaaggtacctacaaagtgaatctatgaggcagatatttaaacaatatgtccttaggttggatgcatatgtcagccgtactttgcccccatattgttcccgtttatggaacggctataagaatttcgttatgacagtgttttggaagatacctgtgtagcatgctcattttaagtatatctaaatattattttgtatatactcacactcctctatagaaagcaaaaaatttcaaaaacgtttgaa

SEQ ID NO: 2152 - DNA, 702 bp, Saccharomyces cerevisiae
ctgagacaaagacccacaaagctagctagcattgccgcacttctccagaacaatgttctcctttgtccaaagattccagaatgtatcgaaccaggccttttcaatgggaattgtaatggttgtattcatcatggcatcctcatactatcaattaatcaataataacgcgttctcagtacctagtaatatcgataacgtcaaaactttaataaatgttagaacaagtagatattttggctcacagagaggcaaggcaaaggaaaatatgaaaattaaatttgatctaaatacagatctcactcccctattcaattggaatacaaagcaagtttttgtctatctaactgctgagtataacagtactgaaaaaataacaagtgaggtaacattttgggataagatcataaaaagcaaggatgatgctgtgattgatgtgaacgatctaagatccaagtattctatctgggatattgaagatggaaaattcgaaggcaaggatttggttttcaagttacactggaatgttcaaccatgggtaggtttgctaacttacggtgaaactgtaggcaactatacactgaccgtggaaaataaaaacaaagtttagactagtctttgctctctcaatttttgttaattatttacatgattttttgatatatatgcagttgattatacaatatgatatatgcatttctagaa

SEQ ID NO: 2153 - DNA, 1925 bp, Saccharomyces cerevisiae
atgtcattcagattattcacgaggacttctcaacgtctccctcgccttaactgggttagtcccatcaggcgatacgccaaacaacctcaatacgatgaagcagagttgtttgcagagaacattaaccatggcgcatataaagcaaagaaaaggccatcagacgagcatttccaatggcctgagaagtctcctgatcagatcacaaaggaatctgaactccaatgggaaaggatggcgaaattatctgctgttgggcaagggatcctcattctcgtggtagtgggtgggttgggaacggcctacttgcgttggccagaattaaaatcctggtggttaatcaagatgaatggcggtcgcataaatgcaacgcaagagcaaagtggacaggattcgttggaaaaattgatcagacaaaaggccaaaaatctattaagggagattcctcaagtgcctgcctttcaacttggaatagatcatcctggtgtatacatatggggaaggtgtcattctaaggactcattgttccctgttagagtacctaatttggatggtcgtaaattcagagatatcctattagctccctctgacgatttcaacaccaattttgcaattgacgagaaaggcgatttgatatcgtgggatgatttgggacaaacaaaaacgatattgccagatcaagatttgacctcaatgaagtattctagtcactttttgtacgctttgaataaaaagggtgaaatattggtcatacctataagaacgccggatctgatagcttcgcaagtatcatcaagaaggtcgaaattgttgccatggaagacaaaactaagatatgattggaaattacaaacaaatcagattttcaacggtaaggaaggagaaaaacgtgtagtacaatttgacgctggtagccatcatctggtgttgctatctaatttaggtaaggcttattgctgcgcgacgggaaatgatcaaaaacaagctcaagtatccaaaggacaattcggtataccaacattctcacaattcgatgagtttcctcccaataatcaactattcgaaattgaactgctgaacaaatttaagcatgaaggagaagacgttgtccgcaaaagagaaattaaaaagatagcttgcgggtcgtaccatacactggcaatagataagactggtgaaatttatgcctttggctggaataggttcggccaattggcactacctatttcgtacaatctagaatatgtttctttcccaagatcggtaacgcatgcatttaaaccgcatttcccggggatgacgaattggaaatgtgtggatattcattgtgatgatgaaacatcgtttgtgaccattcgtaagcctggctcaacgtcagaccatcattatttcgcgtttggtaatggactttttggtgaattgggcaacaacactttcaagaactcgcaatgtgatcccataaaaatcaagtcggatgacaagaaattgaccaactggagttgcggctctcattgtgtgttcactgaaactgaacaagaaaacgaggtcattgcatggggtaataacgaccatggccaactaggtattggaaagaaaactatgaaatgcgctaagccaatgaacattcccgaagttctcaaaccaggacaagacacgacagatttggactcaatttataacagtaaattacacttaaaaaaggagcaacgtgtagtcaccaatggtaataaaagttgcttatactggcgggtttgagaaacgaaagagcatagaaggaaagtagcgagattcgcgatgttttttcaacccttataatgatgcatgtatatatggtatgtttatttatatatagaactcacggttacttctatcttaaccatttcaacacataataaatacctatgatcaagagaattaacgcgatccaa

SEQ ID NO: 2154 - DNA, 2058 bp, Saccharomyces cerevisiae
aaaggacttgacagaccaaagacgcgtataatacaccaagaatggccttattggagaagttgcatcgaaggattgttgatatggggcttgtcccgcgtataatcgccttattaccagttatttccatgctatgcgctctatttgggtttatttctatagctattctgcctatggatggacagtacagaagaacatacatttctgagaatgcattgatgccttcacaagcgtatagttactttagagaatctgaatggaacattttgaggggctatcgatctcaaattaaagaaatggtaaacatgacttctatggaaagaaacaatttgatgggttcttggttacaagaatttggtactaagactgctatttacgaaaatgaacaatatggagaaacattgtacggtgtaatgcacgctcctaggggtgatggaacagaagcgatggtgcttgccgttccatggtttaattcagatgatgaattcaatattggcggcgcagctttgggtgtatctttagcaagatttttctcacgttggccagtatggtccaagaatataattgttgtcttcagcgaaaatcctcgtgcagcattaagatcatgggttgaggcataccatacttccttagatttgactggtggttccattgaagctgctgttgtgttggattattcgagtacggaagatttcttcgagtatgtagaaatctcatacgacggtctgaatggtgagctgcccaatttggatcttgtcaacatcgctatatccattacggaacatgaaggtatgaaagtttctttgcacggtctacccagtgatcagttaactaataataatttctggtcaagattaaaaatattatgcctgggaataagggattgggcgttgtccggtgttaaaaagccccatggtaacgaggcatttagcggctggaggattcaatctgtaacattgaaagcacatggaaacagtggtcatgatattactacatttggacgtatacccgaagcaatgtttcgctctattaataaccttttggaaaaatttcaccaatcgttcttcttttatttgttattagcaccacgtcagttcgtatccattagtagttatttgccaagcgctgtggctttatctatagcattcgccataagttcattaaatgcatttataaacaatgcttatgcaaatatatccttattttccgagtataatttggtagcgttgttggtttggttcgtgtcattggtgatatcatttgttgtttcacaagcgtttcttctaataccttcatcgggattattgatgacaattagcatggcatcttgttttttacctttgatactttccagaaaaattcacatctcagaaccactatcatacaggttgaaaaatgttgcttttttatatttcagtttggtttcaacatctttgctaatgataaactttgcaatggctttactgatcggcacattggcatttcctatgacatttgtgaagaccattgttgaaagttctagcgaacatgaggtgacaactcaatcctctaacccaataaaaactgagccgaaagatgagatagagctcgtcgagaatcacatggatacaacgccagcaaccccccaacaacagaaacaaaaactaaaaaatttagtactattaattttgacaaatccatttatttcaataaccttattcggactattttttgatgatgaatttcatggatttgatataataaacaaactggtttcagcatggttggatttgaaatgttggagttggtttgtactttgtataggttggcttccatgttggctattgatattagcgtcatcgtttgaatctaaatctgtcgtagtaaggtcgaaagaaaagcaaagttaggtgccattggtaagaagtaaaggattaacgggtgttcgaactacgcaattgattttatacgcacaaacattacaaatcgaagcaaaagaagatgaaatgatatgatatactgatacaaatatgtattaaataaaacataagtattgatggaaacatggcatagagaagcgaa

SEQ ID NO: 2155 - DNA, 1561 bp, Saccharomyces cerevisiae
cttaagagatatgccgcttggacccaaaagaaagggaaaagtaagtacgcaggtgtagttttgaatgagtggcagtgatagaggagaccggttatacgatgtgttgggggtgacgagagatgcgaccgtgcaagagattaaaactgcttacagaaagcttgccctgaaacatcatccggacaagtatgtggatcaagactcaaaggaggtaaatgaaatcaaattcaaagagatcactgccgcttacgagatcttgagcgatccggagaagaaatcacattacgacttgtatggtgatgataatggtgccgctagcagcggtggcgctaatggctttggagatgaagattttatgaacttctttaacaatttcttcaataatggaagtcacgatggaaataatttccctggcgagtatgatgcgtacgaagagggcaactctacaagctctaaggatatcgatatcgatatatctcttactttgaaggatttgtacatgggcaagaagctgaagtttgatttaaagagacaggtcatctgtataaagtgccacggttctggctggaaaccaaagaggaaaattcacgttacacacgatgtggaatgtgaatcatgcgctggaaagggttcaaaggaacgtctgaagaggtttggtcccggtttggtagcttcgcaatgggtggtctgtgagaaatgtaatggtaaggggaagtacactaaaagacccaagaatccaaagaacttttgccccgattgcgcaggcttggggctcctgtcaaagaaggaaatcatcacagtgaacgtggctccgggacaccactttaacgacgtaattacagtcaaggggatggcggacgaggaaatcgataagaccacatgtggtgatttaaagttccatctcactgaaaaacaagaaaacttggagcagaagcaaatctttttgaagaactttgacgacggcgccggggaagatttgtatacaagcattaccatatcgttaagcgaggccttgacgggatttgagaaatttttgacaaaaaccttcgacgacaggttactaacattgagcgttaaacctggcagagtagtaagacctggtgacaccatcaaaatcgccaatgaaggttggcccattttagataaccctcatggccggtgcggcgatctgtatgttttcgttcatattgaatttccaccagataactggttcaatgaaaaatcagaactactagcaataaaaacgaatctgccgtcatcttcatcttgtgcctcacatgcgactgtaaatactgaagatgacagcaacctgactaacaacgaaactatatcaaatttccggatcattcacacggacgatcttccagaagggataaggccgttcaagccagaagcacaggattcagcgcatcagaaagcaagaagttcgtactgctgtatccaatgatggcatcaataactttttattctatttttttttttttttcataagttatcctacctgtatatatgtatatatatgaaattcatttactgaatgcggtgaagaatgaagtctttcgca

SEQ ID NO: 2156 - DNA, 1224 bp, Saccharomyces cerevisiae
ccatcgcggcggacataaagcaagcatacaaaggccttctatcagaacagcgattgcgaacttggagcaacaatggcgtcccaggttaacgccttattactgccggtcatagagtctacgccgcttcatcaaataaccaaggtagcattgacgaccacactcacaagtaaacaaagcgattacaagttcaaagaaatagccgtgccgttaacaaaatcactacaactgtacgagaaggcgcaaagaagacaagatttaagggcaagcttaaaagcactggagagtatcatttaccaaacgcacttccaatggaataacccgctcccacgacatgcgcatctcttccaaaaacactaccactttctactgactcactggccatttgagaaccacagagacttggtagattccatcgctgtaaacaatgggaaactaaattcaacgtcttcaaggagcgtctggctgaaggcggattggataacactgtttaacgttaaaaacccttgggtccaaacgccgccatcgttaatgcgtctgagtgggacagatcttgataccttcacaccagagaggatattcctgataaattctcttggaaaccactacaaatttttaatagcgaacagtcatctaagctacaatcacaaaaaatacccctcccctggcgtgcaaattcctgtcaggaacgctcttggcgaagtttctccggccaaacaaattgcccaacttttcgcaagacagctgtctcatatttacaagagcctcttcatagaaaaccccccgctctctcctgagaacgagctggcattgactgccgtcttctatgacgagactgtagagcgacgccttagaaggctctatatgcgagcttgtgcaagggcatatacgactactaatgccgactccaccacggagcctttgatgtttcattgcacccggtgggaagttgattagttgttgttggctgttatactggagtaaatgtcacgtgccactgtggccgtgtcaggtcacgtgaagagagaaattcggccacagttgtggtcctaaacaaggactgaaaaagatcgcagaaactagcaacgtcggatagcggtatggttgaaccaaagtccagtttttagtcatagccggttgagggatgatctgccgttcagtgttctgcgttcaataatacgcatatatatatatatcaaggtatcaacacaatacttgaacaggtta

SEQ ID NO: 2157 - DNA, 345 bp, Saccharomyces cerevisiae
gagcaacaataactagaacatggcagatagcgaggatacctctgtgatcctgcagggcatcgacacaatcaacagcgtggagggcctggaagaagatggttacctcagcgacgaggacacgtcactcagcaacgagctcgcagatgcacagcgtcaatgggaagagtcgctgcaacagttgaacaagctgctcaactgggtcctgctgcccctgctgggcaagtatataggtaggagaatggccaagactctatggagtaggttcattgaacactttgtataagtgtttgttgtttatgtatccgcatatagcagttataacagataaatggcacttttcgcaca

SEQ ID NO: 2158 - DNA, 1157 bp, Saccharomyces cerevisiae
aaagtagcaaagagaaaaagtaggaggataggatgaacaggaaagtagctatcgtaacgggtactaatagtaatcttggtctgaacattgtgttccgtctgattgaaactgaggacaccaatgtcagattgaccattgtggtgacttctagaacgcttcctcgagtgcaggaggtgattaaccagattaaagatttttacaacaaatcaggccgtgtagaggatttggaaatagactttgattatctgttggtggacttcaccaacatggtgagtgtcttgaacgcatattacgacatcaacaaaaagtacagggcgataaactaccttttcgtgaatgctgcgcaaggtatctttgacggtatagattggatcggagcggtcaaggaggttttcaccaatccattggaggcagtgacaaatccgacatacaagatacaactggtgggcgtcaagtctaaagatgacatggggcttattttccaggccaatgtgtttggtccgtactactttatcagtaaaattctgcctcaattgaccaggggaaaggcttatattgtttggatttcgagtattatgtccgatcctaagtatctttcgttgaacgatattgaactactaaagacaaatgcctcttatgagggctccaagcgtttagttgatttactgcatttggccacctacaaagacttgaaaaagctgggcataaatcagtatgtagttcaaccgggcatatttacaagccattccttctccgaatatttgaattttttcacctatttcggcatgctatgcttgttctatttggccaggctgttggggtctccatggcacaatattgatggttataaagctgccaatgccccagtatacgtaactagattggccaatccaaactttgagaaacaagacgtaaaatacggttctgctacctctagggatggtatgccatatatcaagacgcaggaaatagaccctactggaatgtctgatgtcttcgcttatatacagaagaagaaactggaatgggacgagaaactgaaagatcaaattgttgaaactagaacccccatttaatatatctctgcgtacatatgtatatatatatatgtgtgtatatacatgtatgtctgtatagaaaacgcatatcaactgata

SEQ ID NO: 2159 - DNA, 500 bp, Saccharomyces cerevisiae
gcatggtttgccaggcaaaaaacgaccaaattttactgtagtatgagtcaaagtcgctggagtatcgttctcatctttgcattgtttatttttggcagcactggagtgaatgccttcttcaatttcggtcatcatcagcaacagcaacagcaacagcaacaatcatatgaagatcaagttttaaataacccttgtgatgggtatttgtgtccggacaccctaacgtgcgttgcacagcagaaagactgtccttgtcccttccctaaatctcagttgaaatgtgtccttcctgataataaatttgtttgcatatccaaaccagccacacacaatgaaaagtttagagcaatatatgatgaccctgtcaagggccccaaagcaaagaacaaggggtttagggattgtggatgggtatcagatgcttacaaaaaccattgaaatctgtataaaaaatacatacacatacatatatacatacgaaggatttatcttctcattga

SEQ ID NO: 2160 - DNA, 630 bp, Saccharomyces cerevisiae
acaagtactaccaataaccacaacaaaacatgtctgacttagttaacaagaaattcccagctggcgactacaaattccaatacattgctatcagccaaagtgatgctgacagtgaatcttgtaagatgccacaaacagttgaatggtccaaattaatttctgaaaacaagaaggttatcattaccggtgctccagctgctttctccccaacctgtactgtcagccatattccaggttacatcaactacttggatgaattagttaaggaaaaggaagttgaccaagtgatcgttgttactgttgacaacccgttcgctaaccaagcgtgggctaagagtttaggtgttaaggacaccacacacatcaagtttgcctccgacccaggctgtgctttcaccaaatccattggtttcgaattagccgtcggtgacggtgtttactggagtggtagatgggccatggttgttgaaaacggtatcgttacttacgctgccaaggaaaccaacccaggtaccgatgtgaccgtttcctcagtcgaaagtgtcttggctcatttgtagatgctatgtaatagacaataaaaccatgtttatataaaaaaaattcaaaatagaaaacgattctgtacaa

SEQ ID NO: 2161 - DNA, 1761 bp, Saccharomyces cerevisiae
gtattctctggttaccctacatggtctggcggcgttattatacgggaggatcttcgaagggaaggaaggaaaaaaaaaaagaaaaggccaacgaaaagcaaatattatctatcgtcgaaattatcatactatcttacaataagagtagtaattactttcttgtttgtatagtggaagaggaatttgcgataataatagcaaaagtaactaatctctaacaagaaaccttatttattttctctttcttctatattggtaaatactagactcgaaaaaaaggaacaaagggaaaacagggaaaactacaactatcgtatataataatgaccactaacgaggaattcattaggacacagatattcggtacagttttcgagatcacaaatagatacaatgatttaaaccccgttgggatgggggcatttgggttggtttgctcagccacggacactttgacatctcagccagttgccattaagaaaatcatgaaacctttttccactgcagtgctggccaaaaggacatatcgtgaactaaaactactaaaacatctaagacacgagaacttgatttgccttcaggacatatttctttctccattggaagatatatattttgtcacggaattacaaggaacagatttacatagactcttgcaaacaagacccttggaaaagcaatttgttcagtatttcctataccaaattctaaggggtttaaaatacgttcactccgcgggcgtcattcatagagatttgaaaccgagcaacattctgattaatgaaaactgtgatttgaagatttgcgatttcggtctagcaagaattcaagaccctcaaatgacaggctatgtttccactagatactacagggcacctgaaatcatgctaacgtggcaaaaatatgacgtcgaggtcgacatttggtccgctggttgtatttttgccgaaatgattgaaggtaagcctttgttccctgggaaagatcatgttcaccaattttcgatcatcactgacttgttgggatctccgccaaaggatgtgataaatactatttgttccgaaaatactctaaaatttgttacttcgttaccacacagagatccaattccattttctgaaagatttaaaacagtcgaacctgatgccgtagaccttttggaaaaaatgctggtttttgatcctaagaagagaatcactgcggcggatgccttggctcatccttattcggctccttaccacgatccaacggatgaaccagtagccgatgccaagttcgattggcactttaatgacgctgatctgcctgtcgatacctggcgtgttatgatgtactcagaaatcctagacttccataagattggtggcagtgatggacagattgatatatctgccacgtttgatgaccaagttgctgcagccaccgctgccgcggcgcaggcacaggctcaggctcaggctcaagttcagttaaacatggctgcgcattcgcataatggcgctggcactactggaaatgatcactcagatatagctggtggaaacaaagtcagcgatcatgtagctgcaaatgacaccattacggactacggtaaccaggccatacagtacgctaatgagttccaacagtaaacgtgtttttttaatgtccctaaccactcattcttacttctttttgatgtttcttttttttatggtactcataaaagtatttacgtatatagttgtatagaggaaacaaaaaaaaaaagataaaactcaa

SEQ ID NO: 2162 - DNA, 3042 bp, Saccharomyces cerevisiae
aattttcagttccctcataatatagatgtagatattgtataaggtcgtacgtatatcagagtagccactagaaggaccagagaaactggaataagagctattatggtcaaatcataccaacgttttgagcaagcagctgcttttggtgtaatagcctccaatgccaattgtgtttggatacctgcgtcatccggaaatagtaatggtagtggaccaggacaattgattacgagtgctctcgaggacgttaatatatgggatattaagaccggggatttggtcagtaaattatccgatggcttacctccaggcgcatctgatgctagaggcgccaagccagccgagtgtacatatttggaggctcataaagatacggatttattagctgtcggttacgcagatggtgtcattaaagtttgggatttgatgtctaagactgtgcttttgaattttaacggtcacaaagcagctataacattattacaatttgatgggactggcacaagattaatttctggttccaaggactccaatatcattgtatgggatcttgttggagaagttggtctttataaacttagatcacacaaggattccattactggcttttggtgtcaaggagaagattggctgatcagcacctccaaagatggaatgatcaagctatgggacctaaaaacacatcaatgtatagagacacatattgcgcatactggagagtgttggggccttgcagtgaaggatgatttactgatcacaactggtactgatagtcaagtaaaaatttggaaactggatatagaaaatgacaaaatgggggggaaactaacagagatgggtattttcgaaaagcaaagtaagcaacgtgggttaaagattgagttcataacaaattcgtctgacaaaacctcttttttttacatccaaaatgctgataaaaccatcgagactttcagaattagaaaagaagaagaaatagcaagaggtttaaagaaaagagagaagaggctaaaagaaaaggggttgacagaagaagaaattgcaaaatctattaaagaatcctactcctcctttatattgcatccttttcaaaccataagatcattgtataaaataaaatctgcatcatggacaacggtctcaagttccaaacttgagttggtattaactacatcgagtaataccatagagtattattccattccatatgaaaaaagagacccaacaagccctgctcctctcaagacacatactattgaattgcaagggcaaagaacggatgtgcgtagtattgacatcagtgatgataacaaattacttgccacagcatccaatggttcattgaaaatatggaatatcaaaacacataaatgtatcagaactttcgaatgtgggtatgcattaacttgtaagtttttgccaggtgggctactagtcatactgggtacaagaaacggggagttacagctctttgatctagcatcatcaagtcttttggataccattgaagatgcacatgatgcggcaatttggtcgctagatctgacctcagatggtaaacgattagtgaccggatctgccgataaaactgtcaagttttgggatttcaaagttgaaaatagcctagtgccaggtaccaagaacaaattcctgcctgttttaaaactgcaccatgatacaactttggaattaactgacgacattttatgtgtacgggtttctcctgacgatagatatctagccatctcgttgctggataatactgttaaggtattctttttggactcaatgaagttttacctaagtttatatgggcacaaattacctgtactatctatcgatatttcatttgattctaagatgattattacgtcttccgcagacaaaaatatcaagatttggggtttagattttggtgactgtcacaagtctttatttgcccatcaggattcgattatgaacgttaaattcttaccacagtctcacaacttctttagttgttctaaagacgcagtggtgaaatattgggatggcgagaaatttgaatgcattcaaaaactatacgctcatcagagcgaagtttgggctttggcggttgctactgatggcggctttgttgtttcttcatcccatgatcacagtataagaatctgggaagaaaccgaggaccaggtatttttagaagaggaaaaggagaaagaacttgaagaacagtacgaggatacattgctaacttctttggaagaaggaaacggtgatgatgcatttaaagctgatgcatcgggtgaaggcgttgaagatgaagcatccggtgttcataaacagactttagaatcgttaaaggctggtgaaagacttatggaggcgctagatttaggaattgctgagattgaaggtttagaggcatataacagagatatgaagctatggcaaagaaagaagttgggtgaagcgccaataaaaccacagggtaacgctgttctaattgctgtgaataaaactcctgagcaatatattatggataccctgttaagaataagaatgtctcagttagaagatgcactgatggttatgccattctcatatgtcctcaaatttttaaaatttattgataccgttatgcaaaacaaaactttgctgcactctcacttaccattaatttgcaagaatttatttttcattatcaaatttaatcataaagaattggtttctcagaaaaatgaagaattgaaattgcaaataaatagagtaaagactgaattaagaagtgcattaaaatctaccgaggatgatctaggctttaatgttcaagggttgaaattcgtcaagcaacaatggaatctaaggcataactacgaattcgttgacgaatatgaccaacaggagaaagagagtaatagtgcaaggaagagagttttcgggaccgttatataataaaactattatcctacataataccggcattactctgcccttttcacacttcaaaaggatagattaaattatctgtatattatacaattccaatcataaaaattgtca

SEQ ID NO: 2163 - DNA, 1929 bp, Saccharomyces cerevisiae
gctaaaagaacttgtatataagagctgccattctcgatcaatatactgtagtaagtcctttcctctctttcttattacacttatttcacataatcaatctcaaagagaacaacacaatacaataacaagaagaacaaaatgtctgaaataaccttaggtaaatatttatttgaaagattgagccaagtcaactgtaacaccgtcttcggtttgccaggtgactttaacttgtctcttttggataagctttatgaagtcaaaggtatgagatgggctggtaacgctaacgaattgaacgctgcctatgctgctgatggttacgctcgtatcaagggtatgtcctgtattattaccaccttcggtgttggtgaattgtctgctttgaatggtattgccggttcttacgctgaacatgtcggtgttttgcacgttgttggtgttccatccatctcttctcaagctaagcaattgttgttgcatcataccttgggtaacggtgacttcactgttttccacagaatgtctgccaacatttctgaaaccactgccatgatcactgatattgctaacgctccagctgaaattgacagatgtatcagaaccacctacactacccaaagaccagtctacttgggtttgccagctaacttggttgacttgaacgtcccagccaagttattggaaactccaattgacttgtctttgaagccaaacgacgctgaagctgaagctgaagttgttagaactgttgttgaattgatcaaggatgctaagaacccagttatcttggctgatgcttgtgcttctagacatgatgtcaaggctgaaactaagaagttgatggacttgactcaattcccagtttacgtcaccccaatgggtaagggtgctattgacgaacaacacccaagatacggtggtgtttacgttggtaccttgtctagaccagaagttaagaaggctgtagaatctgctgatttgatattgtctatcggtgctttgttgtctgatttcaataccggttctttctcttactcctacaagaccaaaaatatcgttgaattccactctgaccacatcaagatcagaaacgccaccttcccaggtgttcaaatgaaatttgccttgcaaaaattgttggatgctattccagaagtcgtcaaggactacaaacctgttgctgtcccagctagagttccaattaccaagtctactccagctaacactccaatgaagcaagaatggatgtggaaccatttgggtaacttcttgagagaaggtgatattgttattgctgaaaccggtacttccgccttcggtattaaccaaactactttcccaacagatgtatacgctatcgtccaagtcttgtggggttccattggtttcacagtcggcgctctattgggtgctactatggccgctgaagaacttgatccaaagaagagagttattttattcattggtgacggttctctacaattgactgttcaagaaatctctaccatgattagatggggtttgaagccatacatttttgtcttgaataacaacggttacaccattgaaaaattgattcacggtcctcatgccgaatataatgaaattcaaggttgggaccacttggccttattgccaacttttggtgctagaaactacgaaacccacagagttgctaccactggtgaatgggaaaagttgactcaagacaaggacttccaagacaactctaagattagaatgattgaagttatgttgccagtctttgatgctccacaaaacttggttaaacaagctcaattgactgccgctactaacgctaaacaataagctaattaacataaaactcatgattcaacgtttgtgtatttttttacttttgaaggttatagatgtttaggtaaataattggcatagatatagttttag

SEQ ID NO: 2164 - DNA, 1141 bp, Saccharomyces cerevisiae
atggcattcaagttatggctactggatgaggaaacaatatacgagcacgtgttcgaacggtacacacaattggagggccagtccgggaaactggcgcaggatttgggtattcaggatagaaggggcggtgtgctagagataacgtttgaaccctctgggctggaaggcggcagaaaaaaaaagcgagtgagaagaagaaataaggctagtagtgttgaagaagatcagaatgttgctgtggatagctatcatgttagcgtggggcagtccatatcaagcttgcgctcgtccagagacaacggaaactccaccacaggatacgttttgtggtctaccacacctttcttcatcaactggctgctgtatagtactagcgctgcacctttccgtcttgggagtcaggtggaagtaacctgcgggtcttcttgcgaggggcacaagcttgagttgcccaggctggtcgacctcacgggcgctgatcgcggcaagagaggtatcttggaacttggagcaggaatatcaggtattttgcccgtgattcttggtaacttcgtcgacacctacgtgtcgacagatcagaagggcattcttaataaattaaaagataacatcatggaaaacttatcacagttgaccagaaagcggtgcatttcccgatcactaagattggaacttcccaccgtcgaaccagttggcgacgctgatatcaccgcagcgtcacttccatctaagtctacgttgcatttggaagtagccgctctagactgggagaagataaacttgcaagacaaaaagacccactctctgcatcctgagttgtcactcataggtgaaacatgttcttccgtgtacgttatagctatggatgtcatatacaacgagtacctgatagatccgtttctgaagacgctcaagcaactcaaacactggttacaaactacctacaatttgcaattccatgtcctcgtggggatacacttgcggtcacaagaggtgacaacactgttcttggagaaagccatcatagaatatgacttcacggtttatgatatcgttgaccaggtcatacaagagtcccgttttaacttttatcttatcacctagtcccatatataataatagaaacaatataatgctgata

SEQ ID NO: 2165 - DNA, 3174 bp, Saccharomyces cerevisiae
tggatccgttatcgtcaagataaagcggacttagcgatttacataggatcacactttctacacacatttgatttttaagcttcattttccactgcacttatttttcccaagcatcgtgtttttttgtacattataaaaaaaaatcctgaacttagctagatattatggctatctgggagcaactagaagtctcaaaggcgcacgttgcttatgcatgtgttggtgtcttttcatctatcttctctttagtgtcactttatgtcaaggagaagctttatattggtgagtccaccgtagcaggtatatttgggctaattgtgggtcctgtttgcttgaactggtttaatcctctgaaatgggggaattcagacagtataacattagagataacgagaatagtattatgtttgcaaatttttgccgttgccgtggaactgccacggaaatatatgttgaagcattgggtatctgtgacgatgctattattgccagtgatgacagctggatggcttattattggtctcttcgtttggattcttatacctggcttgaatttttctgctagtttgttgatatctgcgtgcattaccgcaacagatcctattctggcgcagtcggtcgtctccggtaagtttgcccaaagagtacctggtcacttaagaaatctactgtctgcagagtcaggctgcaatgatggtatggcctttccttttttatttctttctatgaatttaatcctacatcccggtaatggaagagaaattgtcaaagattggatttgcgttactatcctgtatgagtgtttgtttggatgcttgctaggttgcttcattggttatgtaggcagaatcaccatcaggtttgccgaaaagaaaaacattatcgatcgtgagtcgttcttagcattttacgttgtcctggcgttcatgtgtgctgggttcggctccattttgggtgtggatgacctattggtatcatttgcagccggtgcgactttcgcttgggatgggtggttttctcaaaagacacaagaaagtaatgtttctaccgtgattgatttgctactaaactatgcgtattttatctattttggtgccattataccttggagtcaattcaacaacggtgaaattggcacaaacgtctggcgtttaattatactttcgatagtggtcatctttttacgtaggatccctgcagtcatgatattaagacctcttatacctgatataaaatcgtggcgtgaggcactttttgtgggccattttggtcctattggtgtaggtgcaatttttgccgctatactagctcgtggagaattagagtctacctttagtgacgaacccactcctttaaatgttgtaccatcaaaagaggaaagtaaacattggcagctgatagcctgtatatggccaataacttgttttttcattgttacttctatcatagttcatggttcttcagttgcaatcataactctaggtcgtcatttgaacacgataacgttaaccaaaacattcactacacacaccaccaatggtgataatgggaaaagttcatggatgcaaaggttgccatcgttggataaagctggacgatcattttcattgcatcgtatggatactcaaatgactttatcaggggatgaaggtgaagcagaagaaggaggaggtcgtaagggactagcaggaggtgaagatgaagaaggattaaacaatgatcaaattggtagcgtcgcaacgagcggaattcctgcaagacccgctggtggtatgccaaggaggaggaaattgtcaagaaaagagaaaagattgaacagaagacagaaactgagaaacaaaggtagagaaatattttcatcaagatctaaaaatgaaatgtatgatgacgatgagttgaatgatctgggacgagaaaggttgcaaaaagaaaaggaagcacgcgccgccacatttgcattgagcacagccgtcaatacacaacgtaatgaggagattggaatgggtggagatgaagaagaagatgagtacacaccggaaaaggaatatagcgataattacaataacacaccaagttttgagtcgtctgaaagatcttcatctctccgaggaagaacttacgtaccaagaaaccgttacgatggagaagagacagaaagcgagattgaaagcgaagacgagatggaaaatgaaagtgaaagatcaatggccagtagtgaagagaggagaattcgaaaaatgaaagaggaagaaatgaaacctggtactgcttatttagatggtaatagaatgattattgaaaataagcaaggtgaaatcttgaatcaagtagatatcgaggatcgcaatgaggcgagagatgacgaagttagtgttgatagtacagcccattcaagtttaactaccacaatgaccaatctatccagtagtagtgggggaaggttaaagagaattttaactcccacatctttaggaaagatacattcattggttgataaaggaaaggataaaaataaaaacagcaagtatcatgcatttaaaatagacaatctgttaatcatcgagaatgaggacggtgatgttataaaaagatacaagataaatcctcataaatctgatgatgataaaagtaaaaaccgcccaagaaacgatagtgttgtatcaagagctttaacagcagtaggactaaagagcaaagcgaacagcggcgtaccgcctccagtagatgaagaaaaagccatcgaaggaccctccaggaagggcccagggatgttaaagaaaaggacattaacacctgcgccaccgagaggagttcaagattccttagatctggaagatgaaccttcatctgaggaggatttaggtgatagttataacatggacgatagtgaagattacgacgataatgcatatgaatcagaaactgaattcgaaagacaaagaaggttaaatgcgttaggtgagatgacggcaccagcggatcaagatgacgaagagttgccgcccttacctgtggaggcacaaacaggaaacgatggtccaggtacagcggaaggaaaaaaaaagcaaaagagtgctgctgttaagtcggcgctatcaaaaacgcttggtctcaataagtaatttattaatacacaaagatatattattttagtatatatataaacgaaatgcc

SEQ ID NO: 2166 - DNA, 1491 bp, Saccharomyces cerevisiae
atggagcaccaacaattgcggaagtacgtcgaattgtacaataaggaggtcgaggaattctacaatggtgccgcgtcaggccgcccagctgagttccatccttccaaagtacatgtaaagagcatccatgaaaaggcgggtaccgccaatgctggtgtagaaatctctagcgttggtgtagactgggacagcgaggagaagaatacctttttctggtgcctttcacgctatagtatccaccgtgtagacgagtggcgctcattgttgcctcggaagagcgccatggagattctaggttattacaggttgttaaggagagcgagtgcgagcgcgagatcgcgtaaggcgggtgacgacggagcgcccattgcgtacgaaatgagcgctgagtgggttgccctggagacaaaactgagcgagacagtgatggccatcacggaaggcgcagccgaggttgccgatgaggaaggacactgcgagggccttatcgattatgaaagctggaaacgcaggtgggtggccatctactcgcacagccgtatcgcggagataagacccttgccccgccacgcgctgccgctatcgcgcagcgcgacgcagactttggagcgctgcgtaagtcgctacacacgtacattgctgtggtgcacggcccttgcgggtatggcttcccgcagcgtcagcgccagggcggccgaatctcgaggacacaagtcgctaccgacggtggtaactcgccggcaagttgagcgtgcactatgcacagaagcccgatcacgtgacctacacgtgcttccaaggcgcattgttttgacactgcgcaaatgggaactagactatccgcgagagggcaaactgttccgcaccaaggagatggcacatctgtttctacaaagccagttgtccagacgggatgcgcccccagtccatcaagacgaaaatcaagaaaatcaagaaaatcaagaaaatcaagaacaagataacactgcaagtgaaggtgaaagcgaggcagaaagggatgaaatcgacgaagcggacttgttccgatcagcattacatgaaaatcagttgctaaaatggttatccaaatgagacacaatgcgaaaaatcgcgcagggacataatttttgttttcattattctttcgcttattccctccgttagctccaccgcttttttgattggaatttcctttcggcaatggctttccggttaccacgcctcgggtttcgcatcccgaaaagcatatctacacaagaaaaatgaatgataaacaattgatgagtggcgctatttcccttatcatctcattattgtacttagtatcgtctattatcaggagaaatcgcatgaactaagcccattttctcacccttctgccttcttatataaagcttgctgggaaccgaacacaaactccacaagtccgtagcagctcttctcttttgtcttttatatatcataaacatcgctacatagtaataacactaa

SEQ ID NO: 2167 - DNA, 286 bp, Saccharomyces cerevisiae
cgaagtagccatggacactgaagagaaaaaaaagactacagcgtcagtagagcatgcccggatgttgcaaaatgaaatacaacagttatttgctcagttgcgggatacgaattctcaaattcgctgcgatcttaacgagtttgaacaaataaaggaatcatctacaacagcggattcaaccacgaacagtgcgaactgataaatttatattcaaatatattttacataaacaatattaatatatatatatattccccctacaatgatgaatgcgtttctgccgtca

SEQ ID NO: 2168 - DNA, 1052 bp, Saccharomyces cerevisiae
atgtccaacccatttgatttgttaggtaacgacgtcgaagacgctgacgttgtcgttttgccaccaaaggaaatcgtcaagagcaacacttcctccaagaaggctgacgtcccacctccatccgctgacccatccaaggctagaaagaacagaccaagaccttctggtaacgagggtgctatcagagacaagaccgctggtagaagaaacaacagatcaaaggatgtcactgactctgccaccaccaagaagtccaacaccagaagggccactgaccgccactctagaactggtaagactgacaccaagaagaaggttaaccaaggttggggtgatgacaagaaggaattgagtgctgaaaaggaagctcaagccgatgctgctgctgaaattgctgaagacgctgcagaagctgaagacgctggtaagccaaagaccgctcaattgtctttgcaagactacttgaaccaacaagctaacaaccagttcaacaaggtcccagaagctaagaaggttgaattagacgctgaaagaattgaaactgctgaaaaggaagcttacgttccagcaaccaaggtcaagaacgtcaaatctaagcaattgaagaccaaggagtacttggaatttgatgccacttttgttgaatctaacactagaaagaacttcggtgacagaaacaacaacagcagaaacaacttcaacaaccgtcgtggtggtagaggcgctagaaagggtaacaacactgctaacgctactaactctgctaacaccgttcaaaagaaccgtaacattgacgtttctaacttgccatctttggcttaagccttatatatgaataattccaactgaaagaatccaataacagtgttctactttctgtttctattactattattattttaattggttatttactatataatttgcaagtgaagatgatcatgctggcaaaccaaagaataaaattgggttgacatccaatcgagaatatgacatatcattttgttttatttaagcaataaaaaataaatgacttttaatttacttttcaa

SEQ ID NO: 2169 - DNA, 749 bp, Saccharomyces cerevisiae
aggtatcccttaattttgacgtcgaatttcatagaagcaaacctatatattttcagtccccagtggacagaccgtttatcagttctaatgaatcagcaacgattctcaaaaaggttgccccaattcttaggaaagtaggaatgtcatcgactaagtttttgaaaccactctgcagaataagggcttttcatacttcaattgccagatcctttaccattccttttctgccaaagattccacagaaacctggaggtgtgagtgggaccgcaaatgattcctcttatatgccgcccgaaagcagagctcagggttcgtaccattggattgtcgagcgcggactgtccttagcggttcttccgctgatcgcagttcccttggtcactacaggccctatttccacttttaccgacacatttctttccttggtcctgctaggtcattgtcatatcggatttcagtcttgcattatagactatatttctgaaagagtctatggaaaggtacatcattacgcgatgtatttattgagcttgggctcctttttatcgttcgtcggtatatataaattagagagtcaagaagctggtcttattgcctctttaaaatcattatgggataacaaacctgtggaaaaaaagaggcagtaatcatcaattaatcaatatggtttggttagtggtgactaccttttttattctcgttatatatgtgtattagaaataatttaataaccgattatttattgctta

SEQ ID NO: 2170 - DNA, 1594 bp, Saccharomyces cerevisiae
agaggaccgatatacacaatgtcaaaggaggatttcgttattaagcctgaagctgcaggtgcttccactgacactagtgaatggccattacttttgaagaattttgataagttattagtcagaagtggtcattatacccctatcccagctggtagttcaccactaaagagagacctgaaatcatatatcagctctggtgtcattaatctagataaaccttccaacccatcatcgcacgaagttgtagcttggatcaaaagaatcttacgttgtgagaagactggtcactctggtacattggatccaaaagttacaggttgtttgattgtttgtattgacagagctaccaggttggttaagtctcaacaaggtgctggtaaggagtatgtgtgtattgtcagattgcatgatgctttgaaggatgaaaaggatttgggccgctcactagaaaacttgaccggtgcgcttttccaaagacctcctttaatctctgctgttaagagacaattacgtgttcgtactatctatgagtcaaacttgattgagttcgataacaagagaaacttaggtgttttctgggcttcctgtgaagctggtacttatatgcgtactttgtgtgttcatttaggtatgctattaggtgttggtggtcacatgcaagaattgcgtcgtgttagatccggtgctctgtctgaaaatgacaacatggtcactttacatgatgttatggatgcccaatgggtttacgacaatacaagagatgaatcttacttgagatccattattcaacctttagaaactctattggttggttacaagagaattgtagtgaaggattctgctgtcaatgcagtatgttatggtgcaaagttgatgatccctggtttattgcgttacgaagaaggtattgagttatatgacgaaattgtcttgataactaccaagggtgaagccattgccgttgccatcgcacaaatgtcaaccgttgacttagcttcctgtgatcatggtgttgttgctagtgtgaagagatgtatcatggaaagagatttatacccaagaagatggggtttgggtccagtcgcacaaaagaagaagcaaatgaaggcagacggcaaattggataaatacggccgtgttaacgaaaacaccccagaacaatggaaaaaagaatatgttccattagacaatgctgaacagtcaacttctagctctcaggaaactaaggaaactgaagaagagcctaagaaagctaaagaagattctttaatcaaagaagtcgaaactgagaaggaagaagtgaaagaggatgacagcaaaaaggaaaagaaagagaagaaggacaagaaggaaaagaaggaaaagaaagaaaagaaggacaagaaggaaaagaaagagaaaaaggagaagaaaagaaagtctgaagacggtgattctgaggaaaagaaatctaagaaatctaagaaatgattctcatcactccatctcatcctatatatttaacagctttctttttttcaaaaaactttttctattattagattagattttttttagtgtgtatattaataacgtaaaatttctttatcaacga

SEQ ID NO: 2171 - DNA, 1993 bp, Saccharomyces cerevisiae
gtatagacacaggaataaagatagaaatagggtaccatggagctgccttcaataaatagcaccacaagtatatccgacaaccaggagttaaggaattactatgacaagttgctgttcaagaacaatagtggcaagtcgctagcggatttgccaggaaaaatggcagattttaacgacaacagcgctgctgcgcatccccgctccagagttgactttatcaacggttacatcggtttcagagaggataagcagtctcttctggggcagaagaacactaaaagggcctcgttcagcgcatttgcggacgaaggaaggaaacagagcgagatgagcattaacgggaagagccctaatttgtctcttttctcatttgagtttaacggcaccccgactcaggacagaaagccatacaaacaggattacttgaatgtgatgaacacttcgcctaacaatattctttctcccttaaacaacagctcccaaaaatactatccacagaaacagcagcagcagcagcagcagcagcagcagcaacagcaacaaagcatctttgacccgggaagaagatcttcctatatttctgatgcgctgattcatggcaatgcggctacccagcaaccacaatactcgcaacctgtatatattaacaacaacccatctttgcaagtaccatacactgctccttccgagtatactcagcagcaacagtactcgtcacccttcaatgctaggcgcaacacccagccagtgctgaacttgcatccggcagccgctcccacaaacgatgccggattggcggttgtcgacggcaagaatttgacgtcatccaaggagctgcatgacttatatcttgactgcgggtcaaactattttgctagtgataaagtttataaatttattgacagcataaagggaactttacgcggggataatgtctccgcctccagttccaggattatagagtttttggattttttgaaaaattgtaatctgaattacaacccacagtctgacgcattcatctccactgctgtttcaaacgcttcgtcgaccggggcggccaaatccaagaacagcacttcaatgcatttgcactataagccattagtgttagtatcgttgaaaaatggtaagctcgaactgttgtctaaaccacaaacggccacacttatactgaaaaggggcgatttggtcattattgatggtgatcgtggtaaagatttagttttggtggtggaaccggttgtagatataaatttggcactatttataaattttttgaagaaaaaaattcactttgattctctaatcaccaatagtcaacagcatttccccaatgaccagtttatcaagactctggttgatacaaccaatggtaagccggtcgctcatgagttgaatccgaagttatatgatatcattgaactaacgcaattgatcatcccatcaaagcaggttctgagatttgccaccccgtgggaatcctccacgaatttacacaacaaattccaggatgagctaaaggctcttcacattgcacagctaaaactgaggtcgctaaataacaataactccggtggcgggttgaacatcaaaatattgaatgcagagttccaattcgacagaaagaaattgactttctactacatttgccaggagcgtaatgatttcagagacctgatcaaagaactctttaagttttacaaaacaagaatttggctttgtgctataccgaacaatttatcgatagattccaaattttatgattcaaacaagtttgagtgggagatgtatcaggatatgatgtcccactattccatggacaacactggaattgtcgtggcccctgaactgaatcgcttgaaactggacgacttccagatcggtgtttatatggaattggtgaaggttttgttcggctaacccaaacttatataatcattataaacattttataaacttatacacttttttaataatctcaccatgtttt

SEQ ID NO: 2172 - DNA, 1453 bp, Saccharomyces cerevisiae
tagagtaaaaaccaggaatttaccctaaaaacaagaaaaaataagataaacgaaaatatggccggtacatttttattcacttctgaatccgttggtgaaggtcacccagataagatctgtgaccaagtttccgacgccatcttggacgcttgtttagccgaggaccctcactccaaagttgcgtgtgaaaccgcggcaaagactggtatgattatggtctttggtgaaattactaccaaggcacagttggattaccaaaaaatcgtcagagacaccatcaagaagattggttacgatgattccgccaagggtttcgactataagacctgtaacgtccttgtcgccattgagcaacaatctccagatatcgcccaaggtgtccacgaggagaaggatttggaagacatcggtgccggtgaccaaggtatcatgtttggttacgccacagatgaaactccagagggtttgcctttgactattcttttggctcataaactaaacatggccatggctgacgcgagaagagatggctctttagcgtggttgagaccagacaccaagactcaagtcaccgtcgaatacaaggatgaccacggtagatgggttccacaaagaatcgacaccgtcgtcgtctccgctcaacatgctgacgaaatcacgaccgaggacttaagagcgcaactaaagtccgagatcattgaaaaagtcatcccaagagacatgttggacgaaaacaccaaatactttatccaaccttccggtagattcgtcatcggtggtcctcaaggtgacgctggtttgaccggtagaaagatcatcgtcgacgcttacggtggtgcctcatccgtcggtggtggtgccttctccggtaaggactactctaaggttgatcgttctgccgcttatgccgctagatgggttgccaagtccctagttgccgctggtttatgtaagagagttcaagttcaattttcttatgccatcggtattgcggaaccattgtccttgcacgttgacacctatggtactgcgaccaagtctgacgaagaaattatcgacattatcagcaagaactttgacttgagacctggtgtattggtcaaggagttggacttagctagaccaatctacttgccaaccgcttcttatggccatttcacaaaccaagaatacccatgggaaaagcctaagactttgaagttctaagcttttttccttttggacttttttctgccttcaacctcccatgttttcatttgctcaacacaagtcaacatgtacattataccgtatttgatgcagggacgcaataccatcatattcttgatatagactcatttttctcaaatcaaatttgtatcgatttcattttgcattatacaggattccttttcctttctaacatttaatacgtaactactaatattaatatatacctccttcaacggatcaa

SEQ ID NO: 2173 - DNA, 385 bp, Saccharomyces cerevisiae
acaaataatatagacaaaaatgggtaagggtactccttcattcggtaaacgtcacaacaagtcccacactttgtgtaacagatgtggtcgtcgttctttccatgttcaaaagaagacctgttcctcctgtggttatccagctgctaagaccagatcttacaactggggtgccaaggctaagagaagacacactactggtactggtagaatgagatacttgaaacacgtttcaagaagattcaagaacggtttccaaaccggctctgcttctaaggcttctgcttaatttttatactaagatctatttctttaaatgaaaactcaataattagagaccttatataataaccaactgcaaaaaaacttctaaacaattagttaacaa

SEQ ID NO: 2174 - DNA, 883 bp, Saccharomyces cerevisiae
accagatatctagtcaccaagaagaaaacccgtaaaatcgtaggtcatggtcgaagattccagagttagagacgccctcaaaggtggtgatcagaaggcattaccggcctctttggttcctcaagcacctcctgtcttgacatcaaaggataagattactaagcggatgattgtggtattagcgatggcatccctcgagacacacaagatatcgtccaacgggcctggtggtgacaaatatgtccttttgaactgtgacgaccatcaaggtttattaaaaaaaatgggtagagacattagtgaagcaagacctgatattacccaccaatgtcttttgacgttgctagattctccaatcaacaaagccggaaagctgcaggtctatattcaaacaagtcgaggaattctgatcgaggttaaccccactgttcgtataccaagaactttcaaaagattttcaggtttaatggttcagttactacataagctttctatcagatcggtaaattctgaagaaaagttacttaaagtcattaagaacccaattaccgatcacctacctactaagtgccgtaaggtgacattatcctttgacgcaccagttatccgcgttcaagattacatcgaaaaactagacgatgatgaaagtatatgtgtctttgttggtgccatggcaagaggtaaagataactttgcggatgaatacgtcgacgaaaaagtcggcttgtccaattacccattgtctgcctcagttgcatgttctaaattttgccatggcgctgaagatgcttggaatattttatagtgtttaagtctacttggcatcctctttgtataataaacagtcaatatacgatatagaaacaatcgagttagcgattaa

SEQ ID NO: 2175 - DNA, 2297 bp, Saccharomyces cerevisiae
taagcagacgtgggtacttacatgagaagcagatcattgaaattttactaagttaaagaagaggaagggctccaatgattgtaagaatgatacgtctttgtaaaggtccaaagttgttgcgaagtcaattcgcatcagcaagtgcactatattcaaccaagtcattgttcaaacctcccatgtaccaaaaagcggaaattaatttgattattccacatagaaagcactttttgttgcggtcgattcgattacaatcagacattgcgcaaggaaagaagtccaccaagcccactttaaagttgtccaatgcaaattcaaaatcctcggggtttaaagacattaaacggctattcgtcttatctaaaccggaatccaagtacattggtcttgccctccttttaatcctcatttcaagttcagttagtatggctgtaccttccgttatcggtaaattattagacttggcttccgaaagtgacggcgaagatgaagagggctcaaaaagcaataagttatatggttttacgaagaagcaatttttcacagcattaggagcagtatttataattggagcagttgctaatgcaagcagaatcatcattttaaaggtcaccggtgagagactggtcgcaagattaagaacgagaacaatgaaagctgcattagatcaagatgccacatttttagatactaatcgtgtcggtgatttgatctcaagattatcatctgatgcatctatagtggccaaatcggtcacacaaaacgtctctgatggaacaagggcaattattcaagggtttgtcggttttggcatgatgagcttcctctcgtggaaattgacttgcgtaatgatgattttagcccctcctttaggtgctatggcactgatatatggtaggaaaatacgaaacctatcaagacagttacaaacctcagtaggtgggttaacaaaagtggcagaagagcaattaaatgctactaggacaattcaagcatatggtggtgaaaaaaacgaggttcgccgctatgcaaaagaggttagaaatgtatttcatattggtctgaaggaagcggttacttccggtttattcttcggaagtactgggctagttggcaacactgcaatgctgtcgttattattggttggaacaagcatgattcaaagtggttcaatgactgtcggtgaattatctagtttcatgatgtatgccgtgtataccggaagttcattatttggtttatcgagcttctattcagaacttatgaaaggtgctggtgcggctgccagggtttttgaattaaatgaccgtaagccattgattcgtccgactattggaaaggatcctgtgtcattagcccaaaaacccatcgttttcaaaaacgtgtcattcacttatcccactcggcccaaacaccagattttcaaggatttgaatattactatcaagcctggtgaacacgtttgcgctgtcggtccatcaggaagcggcaaatcaacaattgcgtctttgttgctcaggtactacgatgtgaactcaggatcgatcgaatttggtgatgaagacatcagaaatttcaacttgaggaagtatcgaagactaataggatacgtgcaacaagaaccactacttttcaatgggactattctggacaatatcctctactgcattccgcctgaaattgcggagcaggatgatcgtattagacgtgctattggaaaagctaattgcacaaaatttttggccaattttccagatggattgcagactatggttggtgctagaggcgcgcaattgtccggtggtcaaaagcaaagaattgcattagctagagcgtttttactagatcctgccgtccttattttagatgaagcaaccagtgcccttgactctcaaagtgaagaaatagttgccaaaaatcttcagagacgtgtggaaagggggttcactactatatcaattgcacataggctttcgacgatcaaacacagtactagggtgattgtgttaggaaaacatggctcagtggttgaaaccggttcattccgagatctaatcgccattcctaatagtgaactaaatgcgctgcttgccgaacagcaggacgaggaaggaaaagggggagtgatagatttggacaatagtgttgcccgggaagtataagaagttgccgcagtatggaatcacttttctatgccacagttatggtatgtgttggaagacaattaattatcgcattatgtttgctgaatatgaaattgtgtattctataatttaaatgatgcccaatgtaattta

SEQ ID NO: 2176 - DNA, 1906 bp, Saccharomyces cerevisiae
tgcaaaatcaaaaaaaaaaaacacaactaataaactaaacaactaaaaaaatgaattctccaacaatgaaatcggaacaacttactccaaaactctcaccaatgtccttttgtttggatgaccaaagaaatgcaggctcttttcaaaatctattgaactcacctacgaagctaaaattagacactggcccgattggtaattccttgttatatccaacatcactctctaaattgagcgagttatcaagaggtggacgttctaaacaaagaaggggctctgacactatgaggtctgtatcgcctattaggtttcagtttttgaacaacactccaaagatgttaaaacccgagtacctatctcaaacaaccagtaatctgccattgctatctgccctattgaagaatagcaagaaaactactagtgaaggccagaattcaaaccctgatccattgaacatagagaaaaacatcattaaacaaagcatcaaggacaaactagagcagctgcgcagttcagaatccgttgcgcaagtacaaaagaaagaacgcaatcccccttcatttgaggccaaagtctgtgcggaagaaccgatattacggaaaaacgccgaagggttgctcccctcatacgttcctgttcctgctactcctttggaagatccagaaaatcatggggtgcgaaaggtcgaggacaaaggacttagagtcgtctccggcggctccactcagtgtctaagcaccgaagtgaacgaattgcctaaggatctgaatctagacaatttacctacggataataacgggttcgttcaatatggtctcaaaggcaataacaacaacaacagatatagctttatctcgtctacgtcgacggactatgagcccgaatggtgtgacggacaacaacatatttcaatgcaaatggcctctatggccaatgcagaggaggcaaatagtcgtgaaaaatcgaatttagacataaagatcaagcagctagaacttgaaattacagaattaaagttgcagaatgaaaaattagtgcattccatgacgacgaacagatacattgaagaaagatttatgcttgaggttatgaaggatcctagtatacaggctcaaagatcccaaagagatattgagagaaaagtcaagcaactggagaaaaaattcttcaattgtaaaaaagttcttaagaaattgactgaatcctccgcagtagtggccacctccacttcaaaaactgaaggaaattcagcaagaatcccatgccctaagactagactggcacgcgtttctgttttagacctaaagaaaattgaagaacagccagattcttcttcgggaacttcgtccgaggaagatcatctaacaaacgatgatacggatgctaatactagcgaagatttaaatgttgcttttgaagaggagccaacttctgctatttccacaacagcatctgtgcagagtggggaaagtaaaagaggtttccaacttaaccttcctgtccaagtggagaagaaggaaaaatgaagcgtcaacttcaaattaaattaacttattttacacaaacattcacaatacatcaatgctgataggcgctttgtattgtaggctatcgagttacgcatctgcaatgtgcgtgatttctccgttatccatccttctcattggacaatttttatttgaatattactgaacttcaaagggcttgtcgtgtgatttaatcttttttcttacaacgtcgaatgctgcagctatttattcatagtgtcgtctaagcaaataccccgcttttaaaagctgaatagaaaatccaatcacggtgtgactggtatcacaaacacataatttatatattgcattcaagtttattcaacctatacttaaatacattaattaccaaaaaaaat

SEQ ID NO: 2177 - DNA, 1936 bp, Saccharomyces cerevisiae
gtaccctcagttgagtctattacgccttccttatttggaaacttagaagacgaataaaaaaaacaaaataactaatgatttctgctactaattgggttccaagagggttttcctcggaatttcctgaaaagtatgttctggatgatgaggaagtggaaagaattaaccaattagcacagttgaatttggatgatgctaaagctactttggaagaagcagaaggcgaatcaggtgttgaagatgacgccgcaacaggtagttctaataagttgaaggatcagttggatatagatgatgatttgaaagaatataacctggaagaatatgacgatgaggaaattgcagataatgagggtggtaaagacgtttccatgttcccgggtttaagtaatgatagcgatgttaaattccatgagggtgaaaaaggtgaagatccatatatttcattgcctaatcaagaggatagtcaagaggagaagcaggagttacaagtttacccatccgataatttagttcttgctgcgagaacagaagatgacgtttcgtatttggatatctacgtttacgatgacggtgctgggttccacagtagcgatattcccgttgaagaaggtgatgaagctgacccagatgttgctcgtggattggttcgtgaccctgcactttacgttcaccatgatttaatgttgcctgcttttccactatgtgttgagtggcttgactacaaggttggatccaattccgaagaagcagccaattatgctgccattggtacgtttgatccacaaattgaaatttggaacttggactgtgttgacaaggcctttcccgatatgattctgggtgaacctcttgataattcaatggtgtctttgaaaagcaaaaagaagaagaagaagtctaagactggacacattactactcatcataccgatgctgttttatccatggcacacaacaaatatttccgttccgttttagcatccacctctgcagatcataccgtaaaactatgggatttgaactcaggtaacgcagcccgctccttagcttccattcattcaaacaaaaatgtttcatcatctgaatggcacatgttgaatggttccattcttttgaccggtggttatgattctcgagtagctttaacagatgttagaatttctgacgaaagtcaaatgagtaaatactggtctgccatggcaggtgaggaaatagaaactgttacatttgccagtgaaaatataatattatgtggtactgattctggtaatgtgtattctttcgatattagaaacaatgaaaaccgtaaaccagtttggacattgaaggcacacgatgctggtatctccacattatgttcaaacaaattcatccctggtatgatgagtacaggggccatgggtgaaaagactgtcaaattatggaaattccccttggatgatgctacgaacactaagggcccaagcatggttctgtctcgtgatttcgatgtcggaaatgtattgacatcgtcattcgctccagacatcgaggtagcgggtaccatggtcattggtggtgtcaataaagttttgaaactatgggacgtttttaccaatagatctgtacgtaagagctttaaaagtgaactagagaatgttcaagcaagagcaaaagaagaagcccaaaaaataggaaaaagttcaagaatcgccagaaaatacaccagtaacgataacccagatactgttataaccattgatgatcaaggtgaagatgaagaagaaagagaaggtggagatgagcatgatgacatggcataatctggatatgaaaaatattaaagcagagtacattgcaagtacaaataaaaaatctatagaagataatactgtatactagtgtaagaggagcctcagaaaaaaacaatataatacattaatatgtgctgtta

SEQ ID NO: 2178 - DNA, 1741 bp, Saccharomyces cerevisiae
ctaggagaagaagcgtgcagaacagtatttagtgaaagatggctcctattgaatacctactgtttgaagaacctactggttacgcagttttcaaggttaagttgcaacaagatgacattggttcaagattaaaagaagttcaagagcaaatcaatgattttggtgcttttacaaagttaatcgaacttgtatctttcgcgccattcaaaggtgctgctgaagcccttgaaaatgctaacgacatatcagaaggtttagtctctgagagtttgaaagctatcttggatttaaacttaccaaaggcttcctcgaaaaagaagaacattactttggctatttccgataaaaacttaggtccttctattaaggaagaatttccatatgttgattgtatttcaaatgaacttgctcaggatttgattcgtggtgtcagattacatggcgaaaaattattcaaaggtctacaatctggtgacttagaaagagcccaattaggtttaggtcacgcttactccagagctaaagtgaagttctctgttcaaaagaacgacaatcacatcattcaagctattgctttattagatcaattagataaagatatcaacacttttgctatgagagttaaagagtggtatggctggcatttccccgaactggctaaattggtaccagacaactacacttttgccaagttggttctttttatcaaggacaaagcttcattaaacgatgactccttacatgatttggctgctcttttgaatgaggattcgggaattgcacaaagagtcattgacaatgcccgtatctccatgggacaagatatatcagaaaccgatatggaaaatgtttgtgttttcgctcagagagtcgcttccttagctgattacagaagacaattatacgattacttatgcgaaaaaatgcacactgttgcaccaaacttatcagaattgattggtgaagtgattggtgctagattaatttctcacgcaggttccctaactaatttatctaagcaagcagcttcaacggttcaaattcttggtgctgaaaaggctttgttcagagctttaaaaactaaaggtaacactccaaaatacggtttgatttaccacagtggttttatttctaaggcctctgccaagaacaagggtcgtatttctagatacttggctaacaaatgttctatggcctctagaattgacaattactctgaggaaccatctaatgtttttggttccgtactaaagaaacaagttgagcaaagattagaattctacaacactggtaagccaactttgaagaatgaattagccattcaagaagccatggaactttataacaaagataaaccagctgcagaagtggaagaaaccaaggaaaaggaatcctcaaagaagagaaaattagaagatgatgatgaagaaaagaaggaaaagaaagagaaaaaatcgaagaaggaaaagaaagaaaagaaggaaaagaaggacaaaaaggaaaagaaagataaaaaggaaaagaaggataaaaagaagaaaagtaaggattaaaaggaacaatgaatcgaaataaagtatatcccatctttttgtgtacttttcttccctttaaagtttttcatatatatatatattatcttttattcccttctaatattcttctttaggatttggaagctgtatattgtatatttagaaatattattaaataaaaaagtcatatgttattttgagcttaa

SEQ ID NO: 2179 - DNA, 507 bp, Saccharomyces cerevisiae
agactacatttgagtggaggaacaaaagcaaaaatgtctgaattaggtgccaaatatcaacagttgcaaaatgagttagaagagtttattgtggccagacaaaaattagagacacaattacaagaaaacaagattgtaaatgaagagtttgaccaattagaagaagatacacctgtgtacaaattgacaggcaatgtccttttaccagttgaacaaagtgaggcacgtaccaacgtggacaaaagattagagttcatcgaaacagaaattacaagatgcgaaaagaacataagggacaagcaggaagaactagaaaagatgagaagcgagctaattaaactgaacaatacagcagcttccactggcccaggaaggtaaaacaaactcacaggtcctcggaaagacaagaaagcgcacagtaccaataaatctgcccaaaataaaattttcttttatatacaattatgtaacttacaaacaaaatacctacgcatttcactgtcctaa

SEQ ID NO: 2180 - DNA, 493 bp, Saccharomyces cerevisiae
cgagcacacacgacaccagaacgagataaacatgctaggaagggcattgcgacctgggtggctgggcattactaggacggtggttaagaaaccaagttgcgggtcctactttaacagaacctttcaaacagcaattaacactacaatgcctcccatgcaagagggcatgctgagtacaatgatgatgatgacggctacggcaacaaggatcactggcacagtcagtgagccattaaacggttcaaatatagtgatgcaactcgattcagtgatgagaaagaggaaaaaaaagatgaagaaacacaaactgcggaaaagaagaaagagggagaaggcagaaagaagaaagctatctcagggtagataatagggctgtaaaaacctctcacatgtttttctctgctgtttttccttccctattcttcatattttgatattatttcatgtatatattatgtttgtatttagacttttttttttatacgttatacta

SEQ ID NO: 2181 - DNA, 1989 bp, Saccharomyces cerevisiae
acaactgcgaatacgctcacattctagtttgaccttcacaaattcttatcatcttcttttgtttattttgacacacccctattaagtgtatttgttttgtaagtaatgtctaagcagtttgttcgttctgcaaagaacatgatgaagggctactcatccacacaagtgcttgtgagagatgccacggcgaacgactcgaggactccatcgatagacactctcgacgatttggcacagagatcttacgattcggtggacttcttcgagattatggatatgttagacaagaggctgaacgataagggcaaatactggagacacgttgccaaatcgctgaccgttttggactatcttgttcgtttcgggagtgagaactgtgtgctatggtgcagagagaatttttacgtaattaagacattaagggaattcagacacgaaaatgagtccggatttgacgagggacaaattatcagagtaaaggctaaagaactcgtctctttgttgaatgatgaagaaaggctacgcgaagagaggtctatgaatacaagaaacagaagggcgaacagagctgctaggccaaggccaagaagacaaagaacaaggagcaacccacacgattcttctccctcttaccaggacgatttggaaaaggccctagaggagagcagaattactgctcaagaagatgaacaacgtagaagagaactggcccagtacgacgatgaagatcctgacttccaagctgccttacaactaagtaaagaagaagaggagttgaagcaattgcaggaactacagagattacagaagcaacaacagtctctgtctcaatttcaagctcctttacaacaacaacaaccacaacaacaaccagcgtactacgacattttcggtaatccaatctcccaagatgaatacttacagtatcagtaccaacaggaccaggaacaagcaatggctcagcaaagatggctggaccagcagcaagaacaacagcagcttgctgaacaacaatattttcagcagcaacaacaagctgcggccgccgcttctgccttgcaacagcaacaaacagccgctaatatgcaacaacaacaacaacagcccgctgattttcaacaacctttgcctacaggttctaataatccgttttccatggataatcttgaaagacaaaagcaggagcaacagcatgctcaattgcaaagacaacaagaagaagctagacaacaacaagaacaattgaagctacaacaattgcaaagacaacaacaagaggaagctcaattacaccagaagaggcaagaagaagcccaattacaacagcagcaagcccaattgctacaacagcaagcccagttccagcaacaacaacccttgaagcaaacaaggactgggaaccagtctatatcggataaatacagcgacttgaataccttgttagcaactggtacagggatagatacttttggtaacactggagaggcacgtattcctgcacaacatacaaagacaggcacatttataaattctcagggtacaggctacaaacaggttactaatgaacccaagaacaaccctttcttaagcaaccaatacactggtttaccaagcacaaatatcgtgcccacgcaaacagggtacgggtttggtaaccaacctcaaagtcctcctactaattctcctcagcaaaatcctactggtataagctactctcagccacaacagcaacaacagccacagcaacaaccgcaatacatgcaaaatttccaacaacagcaacctcaatacgcccaaaacttccaacaacaaccacaatacactcaaaattatcaacaacaaccacaatacattcaacctcatcaacaacaacagcagcagcagcagcagcaacagcagcaacagggatatactcctgaccaaggtgtaagcttaattgatctttgatactgtcctatatatacttttttgtcatgggtacacatacat

SEQ ID NO: 2182 - DNA, 2601 bp, Saccharomyces cerevisiae
ttcaccgtgactctttaacccctgccgaatattataagcaaactatgataacactcttattatacctgtgcgtaatatgtaacgcaatagtgttaataagggctgattcgatagcggacccttggcctgaagcgcgacatctactaaataccatagctaagtccagagacccaatgaaagaagctgctatggaacccaatgcagatgaatttgttggattctatgtaccgatggattattccccacgtaatgaggaaaaaaactaccagagcatttggcaaaacgaaatcacagattctcaacgtcatatttatgaattacttgtacaatcaagtgaacaattcaacaactcagaagcaacatatacacttagccagattcacctttggagtcaatataatttcccgcataatatgactttggcacacaaatacttagaaaaattcaatgatctaacccacttcaccaatcattcggccatcttcgacttagctgtgatgtatgccactgggggatgtgcttctggtaatgatcaaaccgtgatccctcaggattctgctaaagcactgctatattaccaaagggctgcccaactagggaatttaaaggctaagcaagtgctagcttataaatactattctggcttcaatgtcccacgaaattttcataaatctttagtattgtacagggacattgctgaacagctgagaaagtcgtactccagggacgaatgggatattgtcttcccctattgggaaagttacaacgtgagaatatcggattttgagagtggcctattaggtaaaggtttgaattccgttccatcttctacagtaaggaaaagaactacgagaccagatattggttcaccctttattgcgcaagttaacggtgtacagatgaccttgcaaatcgaaccgatgggtaggttcgctttcaacggtaacgatggcaacataaatggcgacgaagatgacgaggatgccagtgaaagacgaatcattcggatatattatgcagctttgaatgattataaaggaacatattcacaaagcagaaattgtgagcgcgccaaaaacttgttggaattaacgtacaaggaatttcagcctcatgtcgacaatttggatcctttgcaagtattttactacgtccgttgcttacaattattggggcacatgtatttcaccggcgaaggctcctcgaagcctaatattcatatggccgaagagatcctgaccacgtcgctagaaataagcagaagggcacagggacctataggtagagcgtgcatagatctgggcttaataaatcaatacatcacaaacaatatttctcaagcaatttcgtattatatgaaagctatgaaaacacaagctaacaatggaatcgtagaattccaattatccaaattggccacttcattccctgaagaaaaaatcggcgacccatttaacttaatggaaactgcctacttgaatggattcattccagccatatatgagtttgcagtaatgatcgaatctggaatgaacagtaagagtagtgtggaaaacactgcttacctgttcaaaacattcgttgacaaaaacgaagctattatggcacctaaactgaggacagcatttgccgcattaatcaacgatcgttcagaagtggctttatgggcttattcccaactagccgagcaaggctacgagactgctcaagtctctgccgcctacttaatgtaccagttgccatatgagtttgaggatcctccaagaaccacagatcagagaaaaactttggcaatttcctactatacaagagcgtttaaacagggaaatatagatgctggtgttgtcgcgggagatatctattttcagatgcagaattacagtaaagctatggctctttatcagggtgcagctttgaagtactctatacaggctatctggaacttagggtacatgcatgagcatgggctaggtgtaaacagagatttccatcttgctaaacgttactacgaccaagtttcagaacacgatcatagattttacttggcttccaaattgagtgttttaaaattacacctaaagtcatggttgacttggatcaccagagaaaaagtaaactactggaaaccttcctcgccacttaaccctaacgaagatactcagcactcgaagacttcatggtacaagcaattgacgaagattctacaaagaatgagacataaggaggatagtgacaaagctgcggaagattctcacaaacacagaactgtagtgcagaatggagctaaccataggggtgacgaccaagaggaggcttccgagattttgggcttccaaatggaggatcttgttacgatgggatgtatcttggggatattcctattaagtatattaatgagtacactggcggcccgtagaggctggaatgtccgtttcaatggagcacaattaaatgcaaatggtaaccggcagcaagagcaacaacaacaacaacaagcacaaggtcccccgggctgggacttcaatgttcagatattcgccatatgatgtggtttgtatagatatatacatagactatccatagaaatcacccacgcattac

SEQ ID NO: 2183 - DNA, 1256 bp, Saccharomyces cerevisiae
caacacaatttcgaacagtgaaagtgcattggcgaaggtgatacaattggcttccagctctgaataataataacttacaagcgcaaagataacagataattttatatcagcatacaaatggtcgtcatagctaatgcgcacaacgaattaatccatgacgctgttctagactattatgggaagcgccttgcaacctgctcttctgacaagacaatcaagatctttgaagtcgaaggagaaacacacaagttaatagacacgttgactggccacgaaggcccagtttggcgtgttgattgggcacatcctaaattcggaaccattttggcatcgtgttcttatgatggtaaagtgttgatttggaaggaagaaaacggtagatggtctcaaattgccgttcatgctgtccactctgcttctgtcaactctgttcaatgggctcctcatgaatatggccccctactgctggttgcttcctctgatggtaaggtctccgtagtagagttcaaagaaaacggtactacttccccaataatcatcgatgctcatgccattggcgttaactctgcttcttgggctccagctaccatcgaagaagatggtgaacacaacggtactaaagaatctcgcaagtttgttactgggggtgctgacaatttggtaaagatttggaagtacaattcagatgcccaaacttatgttctggaaagcaccttagaaggtcacagcgattgggttagagacgtagcatggtcacctactgttcttctacgttcttatttggccagtgtttctcaagatcgcacctgtattatttggactcaagacaatgaacaaggcccatggaaaaaaactttattaaaagaagaaaaattcccagatgttttatggagagccagttggtctttgtcaggtaatgtactagctctttccggtggcgataataaagttactttatggaaggaaaatcttgagggtaaatgggaacccgctggtgaagttcatcagtgaagagtatcaagaatttaaaatgaaacatctcaaaagaaaaaagaatgcaaatgagtctatcgacgaatttgaagggaaataaacgcataatgtacagtaacgtataacaattaaagatttgtggaagttttcaaaaacttttcaacttttttctttgttttttttttgcaacttcttatattaatattgtcatagatatttcttatacaaaaacaagcgaacaaaaataatcgacgtatatacaa

SEQ ID NO: 2184 - DNA, 2325 bp, Saccharomyces cerevisiae
acttaaatcatgtaaaaatctcagttttgaagtcgtttgctctcttccatgcttcagttcccttttggaaggtaatataatcatctaatttctcgcatattcacgccgacggaagaacgagccggatcaatatggttagaacccgtgtattattctgcttatttatatctttttttgctacggttcaatcgagtgctacacttattagcacttcatgtatttcccaagctgcgctataccaatttggatgttctagtaaatctaaaagttgctactgtaaaaacatcaattggctgggttcagtgacagcatgtgcctatgagaattccaaatctaacaaaacactagacagcgccttaatgaagttagcatcccaatgttcaagcatcaaagtttatactttagaggacatgaagaatatttatttaaatgcgtcaaattatttgagagcacctgagaaaagtgataaaaaaaccgtggttagtcaaccgctcatggcgaacgagacagcgtatcattattattatgaggaaaattatggtatccatcttaacctaatgcgctctcaatggtgcgcttggggtctcgtcttcttctgggtggctgtgcttactgcagccactatcttgaacattctgaaaagggtgtttggtaagaacatcatggcaaactccgtcaaaaaatcacttatttatccttctgtttacaaagattataatgaacgaactttttatttatggaagcgtctaccatttaattttacaactcgaggcaagggtctcgtcgtattaatttttgttattttgactatattatctctcagttttggtcataatattaaacttccacacccatatgataggcccagatggagaagaagtatggcctttgtgagtcgtagagcagacttgatggccattgcacttttcccagtagtctatctattcggaataagaaataatcccttcatccctataacagggctttccttttctacatttaatttctatcataaatggtctgcctacgtttgtttcatgttggccgttgtacactcaattgtcatgaccgcctcgggagtgaaaagaggtgtgtttcaaagtctggttaggaaattttactttaggtggggtatagtggcaacgatattaatgtctattattattttccaaagtgaaaaagtatttagaaatagagggtatgagatattccttcttattcataaagcgatgaatattatgttcattattgccatgtactaccattgtcacaccctgggctggatgggttggatttggtcaatggctggtattttatgctttgatagattctgcaggattgttagaataatcatgaatggtggcttgaaaactgctactttgagtaccactgatgattctaatgttattaaaatttcagtaaaaaaaccaaagtttttcaagtaccaagtaggagctttcgcatacatgtatttcttatcaccaaaaagtgcatggttctatagtttccaatcacatccatttacagtattatcggaacgacaccgtgatccaaacaatccagatcaattgacgatgtacgtaaaggcaaataaaggtatcactcgagttttgttatcgaaagttctaagtgctccaaatcatactgttgattgtaaaatattccttgaaggcccatatggtgtaacggttccacatatcgctaagctaaaaagaaatctggtaggtgtagccgctggtttgggtgttgcggctatttatccgcactttgtcgaatgtttacggttaccatctactgatcaacttcagcataaattttactggattgttaatgacctatcccatttgaaatggtttgaaaatgaattgcaatggttaaaggagaaaagttgtgaagtctcagtcatatatactggttccagtgttgaggacacaaattcagatgagagtacaaaaggttttgatgataaagaagaaagcgaaatcactgttgaatgtctcaataaaagacctgatttgaaagaactagtgcgctcggaaataaaactctcagaactagagaataataatattaccttttattcctgcgggccagcaacgtttaacgacgattttagaaatgcagtggtccaaggtatagactcttccttgaagattgacgttgaactagaagaagaaagttttacatggtaaggccccttgttaataattcttgcacgcatacttttgttattttgttgctttatcggataaaagttaatataaatcgatgtaaataattttatataatcatacaacagggtaataaaaagacgaatatattcaa

SEQ ID NO: 2185 - DNA, 2519 bp, Saccharomyces cerevisiae
caagaacgagaaggacaaacatcagggacccatacttcaataaattgcttgatttggtgttaatcaattcttctaacatcaaacctcttttagtttccttcgatcgtttcacgttgcttatattgattgctttttacttctattttttcactagaataaacaaacaaagacattctgttgatcaagaaagttgaaaatggtatttggttttacaaagagggacaggagggtacctgatttatctaggtatgattactactatcagaaccatgaagattataacaaaagtcctcagctctctgctgctgctgcctctgctgcttctgccgcatcaccggatcgaaccaattactcaaggtcgcactcgctggttagtcatgcaccttcaataccgagacaaagaagttcggtaaagagcccaggaagaaggctttccacatcctctgccgctccgccaacgtccagggcagcagctaagcagtattcacagaagacttactcgttgaggtcgcaaaggagcggagagtaccatttacacccgcccggttatactactaatgggagccgtatgaattctatgacgtctggtgcgaatgtcagaagaaactacggtaagaacaaatcgacggccggcaacaataacgattcaagggccaactccattaccgtaaagactacacaagtaacagacccttcaggaaggactcaatcaattaccaaaaagacaataagaaaaataaatgggtatgaatacgtagaaaccacgactacgactaagaatttggttccattaggtgactcgcagcgtcatttcgatgaatttagtgaaaattacatgttgcaagatgacgacattttagaggaacaagctagtgataacattcacgatataatcgaggaaaacgaaacagataacgaaaagccatattccccagtaagcgaaagtcatttacaagatgattcagagctaaacgtggaaaaaccagatttcccacttggatcatatttccaccataagtattctacagacgttatgcctctagaagaagaaagtagtttatcaaacttcagtgacgcattagattatattcctcccacccatcagaccagtagtaaatatattcataataaaaggaagcaagcatcgacgacaagaaggaagaaaagaccgcctgccgtgaaaaacgcagaagcagaggccaagaaaccattaaccgaagcagaaatgtatctgaaggcactagaggttgctaaaagaaacgtttatcacacggatgctgcttcggataacgcatcggcccccctcgggagtaacaaatccaggaaaagtaggatgggtcaaaaaatgaccttgagaagcagtagtgattctccgacggcgactgctaatcttgtcaaatctaatgtcgaggttcaaccaaaaagatttacaagttccttcttcagcagaaatactaaaagcgccccccatgaagtgcacaatcactctgtgtctacacattttaaatcgaataaggctgttgacccagttccagagcctaaaagtgcaaacacagggctaacagataaagaaatgtatgaccaagctttgaaaatcgcacaagcgaggtattacaactcacatggtattcaacctgaagcagtcgataatagcactacggcggctaaacctcgtcaggtcggcgttagccatctgggatccactgggagcatcccgcccaatgagcagcactatttaggggattctgaaattccagtccaaagcgaagtgcatgaatacgagcccattccattgcagaagacaaaaacaactggttcttccaaaaataagttcaaaaccatgttcgataaagtgctgcaattctctcaagaaaactacggctaccagcacaagaaggaacaaggcgaacaaactccagttactcgtaatgctgaagaaagcttcccagcagcgtctatttcggaaggtgtgacaaccgcaaagccatcttcaaacgaaggtgtgatgacgaatccagtagttacagattcaccttcaccccttcaacaacaaatagactcgactactgcgtcctcgaatgggcaaagtcagggcaatgtacctacctccgcagtagcttcaacaacgagaacaagatcaccggaactgcaggataatctaaagtcttcttcttcgcttttacaggaccaaacccctcagcgtcaggaagacgccacggatccaacaacatcatcgacgaatgaattatctgccgctgagccaacaatggtcacttcgacacatgccactaagacaatacaggctcaaacacaagatcctcccacgaagcacaagaagtccagtttcttcactaaactgttcaagaaaaaaagcagccgttagcagttgtttactcgaattttgcaatcaaccctaatttttgaagcctggttttagatttattctcttctttttcttcttgtgaacttcaattactaatgtaacttaatttttaatataacttttacagtttaataat

SEQ ID NO: 2186 - DNA, 1134 bp, Saccharomyces cerevisiae
ttttaggtttatagaatagaaatataacagaacgaagcctttagactctttttttttattggtatattgaacaaagaaactttttttttgtcctcccatatctcgtgcacacaaatattatgtccattgtagcactaaagaacgcagtggtgacccttatacagaaagcgaaaggtagtggtggaacctcagagttgggggggtctgaatcaactcccttgttgaggggtagtaatagcaatagttcaaggcatgataacttatcctcatctagctcggatattatctatggtagaaattcagcgcaggatctagaaaactcaccgatgtcagtagggaaagataataggaatggcgataacggttcggataacgaaaaggcgaacctagggttcttccaatcagtagatcctcgcgtaattagcgatttgattatcgggctaagcgacggtttaaccgtcccctttgctctaacagctggtctatcttcacttggtgatgcgaaattggtcattaccggtggctttgctgagttgatctcaggtgcgatttctatgggccttggtggctatttgggagcgaagagtgaatctgattattatcatgctgaagtaaagaaggagaaaaggaaattttacgataactccaacctaattaacagagaaattgaagacattctgttagagattaaccctaatttctcggacgaaacaatcgtttcgttcatcaaagatttacaaagaacacctgagctaatggttgacttcattatcaggtacggtaggggtctagacgaacctgccgagaatagagaactaatcagtgcagtcactatcggtggcggttatctacttggtgggctagtaccactagtgccatatttttttgtctcagatgtgggcacaggtctcatttattctataatagtcatggttgtaacattattctggtttggttacgtaaagacaaaactatccatgggtagtggcagttcgacttcaaagaaagttacggaaggtgttgaaatggttgttgtgggtggtgtagcagcaggtgcggcttggttctttgttaagttactgggttaagtgtaaagtaacaacactatacatatttattgtaaagaaatttggg

SEQ ID NO: 2187 - DNA, 1329 bp, Saccharomyces cerevisiae
ggagtttctcataatattatcactatcggaaggtagcataacctttaatagagtttccgctgtttgcttggctcgtttttttgtttgtactatgcctattggcgcaaagaagacagagtgtgcaaacaagagatgaatcagagcgatagcagcttgatggatttaccactggagatacatttatcattactagagtacgtgcctaatgaacttcgtgctgtcaataaatacttctacgttttgcataaccacagctataaggagaagagtttggcgtggatagctgaggacaactatatatgggccgttgtcaaacattcattatgtttatatgtcaagagtttggacccacttcgacagcatgccagagaaatcattcaagaaacgaaggaaccaggttttaatgtgccactgtgcatgactaaatacatcgcagattcttggtatattgtatacaatgcgctgcaatatcctggaaagataattaatatgggatgggacaaatataccaaaagtcaagattcaaatggttctgattctaccagtaactttaatagtcggcccaaggaaagaactcttatgcagtcgttgacagctttacctgttaacttttggtccaggaggaaggacgagcctacaccggtaaacgtttggttttatgtaaaaaatgcgcacgttgccagatacataccgaaaattattacggaaataggcatatgcaactatgggccgaagcagatcgtggcaagtgcaggatatatcaacgaattgataacatctgaaggaatatactgtgttaacctaggccaccttcccaggctatacgatgagcaaatttttgaaggcactggaacgacacatcttcccctggaactgaaagctatcgacaggacagattcagatgtttgtatcaatggtgatttagttctactcggttatgactttattccatatcagatatcgaagccgtggttactctttagaatcgaacccgtaaatagcattgaagcaatcttcaactatagtgaatgttctttttcataccagtttgcatggagtttggcctgcttacaatctgaagagaaaatttcatttcctagagacacgataattgggcacggtttaccttacaagccatccaaattgataagaattttcgtctacaagcatccggaacaaaagcaagatcttggtcaagaaatagcattgcccaactggaataccccttatcttcgaagatgaaaaaaaaatttatcaattagtctataatatatgtgtatatacgtctatgcacctacctacttataaatggatataatattcttgcaa

SEQ ID NO: 2188 - DNA, 1797 bp, Saccharomyces cerevisiae
atgagtttcggtagtaaagtctccagggctttgagatttttggaaattcctgtcaaagacagggcatctgtgagtttcttgaagaacccggatttgcaacctattaagtcggctaaccaaacatgggggttctggtctaattttgcatattggggtgttatgtccttttcagtgggtacatggatgagtgcctcttctgcactaggtgttggattaagttacccagaaaccattggtacatttatcgtcggtgatgtgttgaccattattttcacattggcaaactcgtgtcctggttacgactggaaggtcggtttcactttggcccaaagattcgtctttggtatttacggttctgccttcggtatcatcatcagaattttgatgagtattgtcaactacgggtccaacgcttgggtgggaggtctttgtatcaatatgatcttggattcatggtctcaccattatttgcacctgccaaacaccttatcttcgaaagttgccatgaccactaaagaattaattggttttatcatcttccacgtccttactgcattctgttacttaatgaaaccctaccacatgaactacattttaatttggtcgtgtgttgctacatttttctctatgttgggtatggtgatctatttagctaaacaggctcacggtgttggagaattgtttacctccactaaatccactgccactggctccaccaaagcttgggcttgggtttatatgatctcgtactggttcggttccgtttctccaggttccaccaaccaaagtgattactcgagatttggttcctccaattgggctatctgggccggtaccatctgtgcattgttaattccaaccactttaatcccagtttttggtgttattggtgcctccacctgtgacaaactatacggtgaacaatattggatgcctatggatatcttcaaccattggttgacaactaactattctgcaggtgctcgtgccggtgcgttcttctgtggtctttcatttgtcctatctcaaatgtcctacaccatctccaactgtgggtttgccagtggtatggatttggccggtttattacccaagtatgtcgacatcaagaggggtgccctttttgccgcatgtgtctcctgggcttgtttgccatggaacttctacaactcttcttctactttcttgactgtcatgagttctttcggtgttgtcatgactcctatcatttctgtcatgatttgcgataacttcttgatcagaaaaagacaatactccatcactaatgcctttattctcaagggtgaatactatttcactaagggtgttaactggagagctattgttgcctgggtttgtggtatgacccccggtctacctggtattgcttgggaagtcaataatgactatttccacaacactggtattgtcaatttcttttacggtgactccttcttctcgtttttgatctcctttttcgtctattggggactatgcctcctcttcccattcaaaattactgtcaaacatgatgacaaagattattatggtgcctttactgacgaagaagcaagaaagaagggcatggttccatacagtgaaatttctgaagaagaaatccgcgcttacacattaggcgaaggttacactaccggccacgagtacagacctgaaggctccgacgatgaaatacctgagttggtcaaaactagctctgaaaacaccaatgagtttgaaatagttcatcataagaataatgaaaagcaatcctccaccgccagtgaaaaagctgcttag

SEQ ID NO: 2189 - DNA, 2349 bp, Saccharomyces cerevisiae
atgacatcatatatcgaaaggctcaagtcggcagcatcgtatcttgatacagttccagatgagcatcatgatttcagaaaacccaccgccaaggttgtaacgacgcaactgactattgctacttcactaggtatttttgctttgctttcgttctcaattctactaaaaaagtggcctagattatacgcaagcagacgatataaagatgacgggaaccttcgcttaccgtcctggaatcagtcaagtttattcggctggttaacagtgttgtataagatacgggacgaacagattctggaatatgcaggtttagatgcgtatgtgtttttgagttttttcaaaatgtgcatcaaattactttctattttttgtttcttctctgtgtgcgttatatctccagtaagatatcattttactggaaaaattgatgacggcaacgatgatgatgacagtgaaagttctttaatacatctggtaaaaagaattgtggagggaagtggcgatggtgacaatcattcagctcccgaacgtacaaatgtgtacctctggatgtatgttctcttcacatatttcttcaccttcatagcaattaaaatggcagttgcggaaacaaagcacgtcgtaagtactaggcaagcttatcttgggaagcaaaatacgattactgatagaacgataaggctctcaggcatcccgatagagcttcgtgattcggaagccttaaagaccagaattgaacaattaaaaatcggcaccgtttcatcaatcactatttgtcgagagtggggtcctttgaacaagctatttcattgtcggaagaaaatactcaaaaacctggaattaaaatattcagaatgtccaagggagctccgtactcgacaaccatattcggagaactatcatttattgggaaacgagcaatcaggcgcagttacacatggagaaaatgttccatcaagcaataataatgacgaggatactatactatattctcaaatttctcttggagagagaccaaaaatgaaaattggatatcgtggtatctttgggaaggaagtagatgccatagagtacctggagcagcaattaaaatttattgatgctgaaattattgaagcgaggaaacaacactactccgcaacacctacggcattcgttacgatggattctgttgctaatgcgcaaatggcagctcaggcggtattagatcctagagtacattacttcataaccagattggctcctgcacctcacgatatcaagtgggatcatgtttgtctttctagaaaggaccggttaacaaaagtttattctactaccgtatttataggcctttcaagtttgtttttagtcattcctgtatcatacttagccacattgctaaatttgaaaacactttcgaaattctggccaagcgtagggcagctactaaaagatcaccagtgggccgctaacattgtaacggggctattaccaacctatctcttcacattgcttaactttggaatcccctatttttacgagtatttgacttcttatcaaggattggtatcatacagcgaagaggaaatctcacttgtttcaaaaaatttcttttatatttttgtcaaccttttcttagttttcacattggcaggtacagcatctaattactgggcgtacctcagcgataccaccaaaattgcttatcaacttgctacatctgtgaaggagttctccttattctatgtcgatttgattatattgcaaggtattggtatgttcccgtttaagttgttattagttggtagtttgatcggctttcctctagtgaaaatcaaggctaagacacctaggcaacggaatgaactttacaatccaccgatatttaactttggactacaattaccacagccaattctgattttgattataacgttgatctacagtgtaatgagcacgaaaattttgacttcagggctggcgtactttattattgggttttacgtctataaatatcaattgatttttgccacagatcatttgccccattctacaggaaaagtatggccattaatttttagaagaatcatcgttggattgctattgtttcaattaacaatgacaggaacactggcaggattcgaaggaggatgggttttgtcatcttgccttttcccgcttccagtagtgacattatgtttcctatatgatttcgagaagaactatttgccgttgtcaaaatatatcgcattgagttcaattcgcgagtacgaaagagacaattctacggtgaattctgccaatgaggaagagtcgtatgcatacccttacgctgtgagtgaattagagggtccgatgttggattga

SEQ ID NO: 2190 - DNA, 974 bp, Saccharomyces cerevisiae
tcaataattaagaggttggcaagtcatcctgatcgtgaaaaaaacttaacaagtacaaatagagtaatcagcattggaaaatgtctcgcgttggtgtcatggtattaggacctgcaggtgcggggaaaagcacattttgtaattccattatatcacatatgcaaactgtaggacgaagagctcatattgtaaatttagaccctgccgcagaagctaccaagtatgaatttactattgacattagagatttaatttccttagatgatgtcatggaagaaatggatttgggccccaatggtgcgctaatatattgcttcgaatatcttttgaaaaatctagactggcttgacgaagagatcggggatttcaacgatgaatatttaatctttgactgtcccggtcaaattgaactctacacgcatatccctgtcttaccgaacatagtgcgccatttaactcaacaactgaatttcaacctttgcgccacatatcttttggaagcgccatttgtgatagatagctcaaaattttttagcggtgcactatctgctatgtctgcgatgattctattggaactaccccatatcaatgtgttgagcaaactagacttgataaaaggcgacatcaataagaaaaaactgaaaagatttttgaatcccgatgcaatgttattaatggaaacggaaggaatgaatcaagcatccaaccctaaatttctaagactgaaccagtgcatagccaacctcgtcgatgatttcggtatggttcaatttttacctttggaatctaataatcctgacagtatagaaaccatattatcgtatgtcgatgatataacacaatgggcagaaggacaagaacagaaagagcctaacgaccaaatagatgtcgaagaatagttatagagaaaattatgtacgcttgattcatataaaaagaggtaaaaaaaaaaaatagcttctcataataaccaa

SEQ ID NO: 2191 - DNA, 2110 bp, Saccharomyces cerevisiae
gaaaaaattaaagaaaataaaatcccagatagttcatacgttatttgaagtacaaacatttaacgattggaaaagacgaaagtattgttaagagtactgcttatttagagaggatcaaacaaaatctcttcgatgcttaaaataaaggcccttttctcgaaaaagaaaccggatcaggcagatttgtctcaggaatctaaaaaaccattcaagggtaagaccaggtcaagcggtacaaataacaaagatgtttcccagattacttcttcccctaagaaaagctttcaggacaaaaatatagttcagtacccgagtgttgtcgcagatgaccatcatatgaagtctttaaccgatgaattagtaaccacgatagactcggactcttcaccgagtgataatattaccacggaaaatgtggaaacagttacttccgtgccagctatcgatgtccatgaaagtagtgaaggtcaattaagttccgaccccttaatatctgacgaatctctttcggaacaaagcgagattatcagtgatatccaggatgacagtactgatgatgacaatatggaagatgaaattccggaaaaatccttcctcgaacaaaaggaattgataggttacaagctgatcaataaaatcggtgaaggtgctttttcaaaagtctttagagccatacctgctaaaaatagttctaatgaatttttaactaaaaactataaagctgttgccattaaagttatcaaaaaggcagatttatcctcgattaatggtgatcatcgtaagaaggacaaagggaaggacagcactaaaacttcttccagagatcaagtcttgaaggaagttgcactacataagacggtttccgctggttgttcacaaattgtcgcgttcatagacttccaagaaacagatagctattattatattattcaagagttactaaccggtggggaaatcttcggcgaaattgttaggttgacctatttcagtgaagatttatcaaggcatgtaatcaaacaattagcactggctgttaaacatatgcattcactaggtgtagtgcatcgtgatataaaacctgagaatcttctttttgaaccgattgaattcacacgctctataaaaccaaaattgaggaaatcggatgatccgcaaacaaaggcagacgagggaattttcacaccaggagttggtggtggtggaattggtatagtaaaactagctgattttggtttgtctaaacaaatattttccaagaacaccaagactccttgtggtacagtcggttacactgcccctgaagttgtcaaagatgagcattattctatgaaagtggatatgtgggggattggttgcgttttgtacacaatgttatgtgggttcccgccattctatgatgagaaaattgacactttaactgaaaaaatatcaaggggtgagtatacctttctgaaaccttggtgggatgaaatcagcgccggtgccaagaatgccgtggctaagctattagaactagagccgtctaaaagatacgacattgaccagtttttggacgacccatggttaaatacattcgattgtttaccaaaggagggcgaatcttcacaaaagaaagcaggtacttccgaaagacgccatccgcataagaaacaattccaactatttcaaagagactcctcgctactgttttcaccagctgctgttgctatgcgtgacgcctttgatattggtaatgctgtgaaacgtaccgaagaagaccgtatgggaacacgtggaggattaggctcgcttgctgaggacgaagaattggaagatagttacagtggcgcccaaggcgatgaacagctggaacaaaatatgttccaattaacgctggatacgtccacgattctgcaaagaagaaaaaaagttcaagaaaatgacgtagggcctacaattccaataagcgccactatcagggaatagcaactttcccttctgtttcaatctttttacctattcctttttaaaagatatatatacattaaactccttctacaagtatatattttatacatatctacagggcgtatatatacataacattttaagataagcaagtgaatgttga

SEQ ID NO: 2192 - DNA, 839 bp, Saccharomyces cerevisiae
ctaaaattttttcatccctgttctattaaaattgtggaaatgaggtttttgaggggatttgtattttctttggctttcactctatataaagtaactgccacggcagaaataggatctgaaattaatgtggaaaatgaggcaccacctgatggtttatcctgggaggagtggcatatggaccatgagcatcagctaaaagattacactccagagactttcttcgcgttacatgatatcaagaagaaaggatttttagatgaaaacgatattctatctctctacgggttgaaccgtgaagaaattgtgggggctggtgatggtatgggacaacacgatgaatctgagaaaattgacaatgaaatggctaagcgtgttgttagccttattatgaggttattggatgttgatgataataccaaaatcaccaaggaggaatatctacaatttgctaagagaggaaacaagttccctgaccttggcgttggtgtaggtcaccactccgattttgagctagaatatgaaattcatcactggaataagtttcataaggacaaagatccagacgttaaagtcgttcacaaagaagacatagaacatgaattgcttcatcatgaacatgaaattgaacatgaagaagaaattcaaagaggcgcttctagagctactgtaataactgatgacgaactagagtctagaatagagctgaaaaatattcccgagaaattcaaaaatggaattttttaatggacttggtcaagatgaatagttgagactgagaaaatattcaagacactatgtatgtagtcaattagcatgtagtaagtaatcaaagcacttaa

SEQ ID NO: 2193 - DNA, 1899 bp, Saccharomyces cerevisiae
taccttcgtaactggaaagaatcagtctgaaagtttattgagcctgaaacggagcaagattatagttgaatgtttcttattcggtgttgatagtagatgatgaccaaagctttttttaacaaactaccgtttgaggtattccgtcggtacgttaggacaggtaaaagcatccctcaaagaagccccaggacaagaaaatctcttctggtgggtgggactattgcatcagcagtagttttgtacaactttaatgacacttttcatgattctgtaaagcacacggcactgacgactaaaagaatcgctgtcgtcacacaagctaccactcgttgcttctaccattacaagagggctctaaataaaagctatgagaacaaaaaagaacgagaagttgccttaaataaatgtcataagatgtgtgccttaatcacgttgcatgcgctacgatcgaatggtgggatatatatcaaattaggccagcacattggggccatgacctacctgttgcctaaagaatggacggatacaatgataccgttgcaagaccactgtcccgaatccacctacgaagaaattgatgagttatttaaagaagatctaggcaccagcattgaggatatgtttttagaattcaacaaaaccccgataggtgtagcttccttggcacaggttcatgtggcaaaactaaaaaatagtgacggtaaaggttctagtgtagctgtcaaatgtcagcatccatcgttgaaggagtttataccattagatgttatgctgacaagaacagtgtttgaactgctggatgtcttcttccctgattatccgttaacgtggcttggtgatgagcttcagtcttcaatctacgtggaactgaattttaccaaagaagctgaaaatgcagaaaaaacccgtcattattttagtaagttcaagaagcaaacagcattgaaaatacccaaggtcattgaaagccacaaaagaattttgattatggaatatgttggaggcaaaaggttggatgatttggagtacattgacagtcacggtatctcgcgcagtgaagtttcgagttgtctctctcatattttcaataacatgatttttactcccaatgtaggtattcattgtgatcctcatggaggaaatctggccatacgatctgttaagcccgctaaagataatggataccataactttgaaattgttttatttgaccacggactctatagatatcctagcacgagaacaagaagactttatgccaaattttggttgtcgctcctattcgacaaggaccagacaaaaatgaagaagtatgccaaaggattcgcaaacatcaccgacgaacagtttccccttttagcggctgcaattacgggccgtagcattgatgctgctttgaattacgacatttcaacgagtcgaacacaagaagaaatggacgtcatggcaaatgggatcttggaaggaacgttactgagcgacttgatgagcattttgtctagaatccctcgtgtagtgcttttgatattgaagactaacgacctaaccagacatcttgatgaatgtctacagaatccactcgggccagagaggactttcctgatcatgacgcaatactgcgccaagacggtctacgacgaaaaagtggaaagaattaattcggagtatgcgaggtggtctattaaatggatgtgggagaacttgacaaactggatagtctatgagaggcgtattaatcaattgtatttttatgattttgtgttgtggtggaaaaaatttattccgaagacttggttgtcatcttaaatcgttagcgttctttctacttgtaaatatatacgtaaaattatatataacaattttatatgtgtcattaaacggaagacgttgttgctatca

SEQ ID NO: 2194 - DNA, 4509 bp, Saccharomyces cerevisiae
atgtcgaataccccttataattcatctgtgccttccattgcatccatgacccagtcttcggtctcaagaagtcctaacatgcatacagcaactacgcccggtgccaacaccagctctaactctccacccttgcacatgtcttcagattcgtccaagatcaagaggaagcgtaacagaattccgctcagttgcaccatttgtcggaaaaggaaagtcaaatgtgacaaactcagaccacactgccagcagtgcactaaaactggggtagcccatctctgccactacatggaacagacctgggcagaagaggcagagaaagaattgctgaaggacaacgaattaaagaagcttagggagcgcgtaaaatctttagaaaagactctttctaaggtgcactcttctccttcgtctaactccttgaaaagttacaacactcccgagagcagcaacctgtttatgggtagcgatgaacacaccacccttgttaatgcaaatacaggctctgcttcctctgcctcgcatatgcatcagcaacaacagcaacagcagcaacaggaacaacaacaagacttttccagaagtgcgaacgccaacgcgaattcctcgtccctttctatctcaaataaatatgacaacgatgagctggacttaactaaggactttgatcttttgcatatcaaaagtaacggaaccatccacttaggtgccacccactggttgtctatcatgaaaggtgacccgtacctaaaacttttgtggggtcatatcttcgctatgagggaaaagttaaatgaatggtactaccaaaaaaattcgtactctaagctgaagtcaagcaaatgtcccatcaatcacgcgcaagcgccgccttctgccgctgccgccgctaccagaaaatgtcctgttgatcactccgcgttttcgtctggcatggtggccccaaaggaggagactcctcttcctaggaaatgtccagttgaccacaccatgttctcttcgggaatgattcctcccagagaggacacttcgtcccagaagaggtgtcccgttgaccacaccatgtattccgcaggaatgatgccgcccaaggacgagacaccttccccattttccactaaagctatgatagaccataacaagcatacaatgaatccgcctcagtcaaaatgtcctgtggaccatagaaactatatgaaggattatccctctgacatggcaaattcttcttcgaacccggcaagtcgttgccccattgaccattcaagcatgaaaaatacagcggccttaccagcttcaacgcacaataccatcccacaccaccaaccacagtccggatctcatgctcgttcgcatcccgcacaaagcaggaaacatgattcctacatgacagaatctgaagtcctcgcaacactttgtgagatgttgccaccaaagcgcgtcatcgcattattcatcgagaaattcttcaaacatttataccctgccattccaatcttagatgaacagaatttcaaaaatcacgtgaatcaaatgctttcgttgtcttcgatgaatcccacagttaacaactttggtatgagcatgccatcttcatctacactagagaaccaacccataacacaaatcaatcttccaaaactttccgattcttgtaacttaggtattctgataataatcttgagattgacatggctatccataccttctaattcctgcgaagtcgacctgggagaagaaagtggctcatttttagtgcccaacgaatctagcaatatgtctgcatctgcattgacctcgatggctaaagaagaatcacttctgctaaagcatgagacaccggtcgaggcactggagctatgtcaaaaatacttgattaaattcgatgaactttctagtatttccaataacaacgttaatttaaccacggtgcagtttgccattttttacaacttctatatgaaaagtgcctctaatgatttgactaccttgacaaataccaacaacactggcatggccaatcctggtcacgattccgagtctcaccagatcctattgtccaatattactcaaatggcctttagttgtgggttacacagagaccctgataattttcctcaattaaacgctaccattccagcaaccagccaggacgtgtctaacaacgggagcaaaaaggcaaaccctagcaccaatccaactttgaataacaacatgtctgctgccactaccaacagcagtagcagatctggcagtgctgattcaagaagtggttctaaccctgtgaacaagaaggaaaatcaggttagtatcgaaagatttaaacacacttggaggaaaatttggtattacattgttagcatggatgttaaccaatctctttccctggggagccctcgactactaagaaatctgagggatttcagcgatacaaagctaccaagtgcgtcaaggattgattatgttcgcgatatcaaagagttaatcattgtgaagaattttactctttttttccaaattgatttgtgtattattgctgtattaaatcacattttgaatgtttctttagcaagaagcgtgagaaaatttgaactggattcattgattaatttattgaaaaatctgacctatggtactgagaatgtcaatgatgtagtgagctccttgatcaacaaagggttattaccaacttcggaaggtggttctgtagattcaaataatgatgaaatttacggtctaccgaaactacccgatattctaaaccatggtcaacataaccaaaacttgtatgctgatggaagaaatacttctagtagtgatatagataagaaattggaccttcctcacgaatctacaacgagagctctattcttttccaagcatatgacaattagaatgttgctgtacttattgaactacattttgtttactcattatgaaccaatgggcagtgaagatcctggtactaatatcctagctaaggagtacgctcaagaggcattaaattttgccatggatggctacagaaactgcatgattttcttcaacaatatcagaaacaccaattcactattcgattacatgaatgttatcttgtcttacccttgtttggacattggacatcgttctttacaatttatcgtttgtttgatcctgagagctaaatgtggcccattgactggtatgcgtgaatcatcgatcattactaatggtacatcaagtggatttaatagttcggtagaagatgaggacgtcaaagttaaacaagaatcttctgatgaattgaaaaaagacgatttcatgaaagatgtaaatttggattcaggcgattcattagcagagattctaatgtcaagaatgctgctatttcaaaaactaacaaaacaactatcaaagaagtacaactacgctattcgtatgaacaaatccactggattctttgtctctttactagatacaccttcaaagaaatcagactcgaaatcgggtggtagttcattcatgttgggtaattggaaacatccaaaggtttcaaacatgagcggatttcttgctggtgacaaagaccaattacagaaatgccccgtgtaccaagatgcgctggggtttgttagtccaaccggtgctaatgaaggttctgctccgatgcaaggcatgtccttacagggctctactgctaggatgggagggacccagttgccaccaattagatcatacaaacctatcacgtacacaagtagtaatctacgtcgtatgaatgaaacgggtgaggcagaagctaagagaagaagatttaatgatggctatattgataataatagtaacaacgatatacctagaggaatcagcccaaaaccttcaaatgggctatcatcggtgcagccactattatcgtcattttccatgaaccagctaaacgggggtaccattccaacggttccatcgttaaccaacattacttcacaaatgggagctttaccatctttagataggatcaccactaatcaaataaatttgccagacccatctagagatgaagcatttgacaactccatcaagcaaatgacgcctatgacaagtgcattcatgaatgctaatactacaattccaagttcaactttaaacgggaatatgaacatgaatggagctggaactgcgaatacagatacaagtgccaacggcagtgctttatcgacactgacaagcccacaaggctcagacttagcatccaattctgctacacagtataaacctgacttagaagactttttgatgcaaaattctaactttaatgggctaatgataaatccttccagtctggtagaagttgttggtggatacaacgatcctaataaccttggaagaaatgacgcggttgattttctacccgttgataatgttgaaattgatggtgttggaataaaaatcaactatcatctactaactagtatttacgttactagtatattatcatatacggtgttagaagatgacgcaaatgatgagaaatag

SEQ ID NO: 2195 - DNA, 1245 bp, Saccharomyces cerevisiae
ttatttttaagaggttctctattcgtcagtgatagaaatagcattttgacccgcacgacattggttaataagagtacttttccacgtgtttcgattgcctttatttttagcatacttgaaaataatattatcgtgagatttaggtaaaatataccacatatcaagagaaagagaagtaagaatggttgacgctaggggtagtacgccatgtttaattggtgattctataagaaacgttaatgatggaaatagtctggatttccagtatactaatcagtttaatgaggaaagtgaggcttcgaggttactaacgccacaaacgagttccaatcacgccctaagcaagatgcagaaggatgatgatattcgagatagatcttatacatctgtagcggaattgaatcgtgagggtgctttgctgaccgacgaagttgatttggagaatgttgatgcttcgaaagttcgcagcaatagagacgacctagaggcagaggagaaaaggaaaaaactactcttgttgaaaaaaaagcaaagaaataaatccatcaactcggaaagtttttcctctccttctctgcgtgcttccaaatctaattcactgattacatcaactgatcctgtcgaagatcacatcagtaagtactcttcatcaggcacccctgaaaatattacaggtgaggcagacgacgaagacgaagacataatcagaaactcttacgggcaaatgatcaaaaacaattccaacaggccacatttggcgaagggtgaatcgtaccagtccgcagaacaggaaatagatcatacggcgcctgaaaaatcagagaaaagacaagaaagaagcggtagatcctttgatagacaaaaatcttcggctgagtttctaagatccttatcgaggtcaataagtcgtggacccacaaagaacaaaacggtttcgccctctaagggagaagactctagaatgtatagtaccagcaactactctatatcattagttgatttggagaacggacccaaaattatcccggaaactttagaagaagagcaggaggacgccgaaaaggagggtgttttgatggaagacgagggtaatgaagaatacaccaaagatttggaagaagcagctaacaaagctcaaccacagtagaatggaatattgaaactggagtgacttctgatgaagtttccaattatttatatgtatacattatttatttgtctatcattaaaatttctgtcaagtaa

SEQ ID NO: 2196 - DNA, 2546 bp, Saccharomyces cerevisiae
actgagaagtggtagtttttttgataactgtgattgaagttttgactacctcagagaaaaattttgaatgtcccgtgacctacaaaaccatttgttattcgagactgcgactgaggttgctaatagggttggtggtatttactccgtgctaaaatcgaaggctcccattacggttgcccagtataaagaccattaccacttgatagggcccttaaataaagccacttatcaaaatgaagttgatatactagattggaagaagcctgaagccttttccgatgaaatgaggccagtgcagcatgccctgcaaacaatggaatctagaggagttcattttgtttatgggaggtggctgattgaaggtgctccaaaagtaatactttttgacttggattctgtgagaggttattcgaatgaatggaagggtgatttatggtcattagtaggaattccctctcctgagaatgatttcgagacgaatgatgctatcctattggggtatacagtcgcttggtttctaggcgaagtggctcatctcgattcacaacacgcaattgttgcgcactttcacgaatggttggccggtgttgcgttaccattatgccgtaaaaggcgtatcgatgtagttaccattttcaccactcatgctactttattgggacggtatttatgcgcctccggcagtttcgatttttacaattgtttagaatctgttgatgttgatcacgaagctggcagatttggcatataccatcgttattgtatagagagagcggcggctcattctgcagacgtgttcactacggtgtcacaaataactgcttttgaagcggaacatcttttgaaaagaaaaccagatgggattttgcctaatggactgaacgtcatcaaatttcaagcatttcatgagttccaaaatttgcatgctttgaaaaaagaaaaaatcaatgactttgtaagaggccattttcatggttgcttcgatttcgatctagacaacaccttgtacttttttattgctggtagatatgagtataaaaataagggtgctgacatgtttattgaggctctagcgcgtttgaactacagattaaaagtatccggatccaaaaaaactgtggtagcgtttattgtcatgcccgccaaaaataattccttcactgttgaagcattgaagggccaggctgaggtgagggcgttagaaaatactgtacatgaagtgactacttcaattggtaaaagaatattcgatcatgctatcaggtacccccacaatggactgacgacggaattaccaaccgatttgggtgaattactaaagagttcggataaagttatgttaaagagacgtattttggctttgagaaggccggagggacagttacccccaatagttacacacaatatggtcgatgacgctaatgacctgattttaaataaaatcagacaagttcaattgttcaatagcccaagtgatcgtgttaaaatgatcttccatccagaatttttgaacgctaataatccgatccttggtttagattatgatgagttcgttcgtggttgccatttgggtgttttcccttcatactacgagccttggggttacacacctgcagaatgtacagtaatgggtgttccctccatcacgacaaatgtctctggtttcggtgcctatatggaagacttgatcgaaaccaaccaagcgaaagattacggtatttatattgtggatcgtcgtttcaaggcacctgatgaatctgtggaacaattagttgactacatggaagaatttgtaaaaaagacaagaaggcaaagaattaatcaaagaaatagaactgaaagactctccgacttactggactggaagagaatgggtctcgaatacgtcaaggcaaggcagttagcattaagaagaggctatcctgatcagttcagagagctcgttggtgaagaactaaatgattccaacatggatgctttagcaggcggaaagaaattgaaagttgcaagaccgcttagtgtacctggctcaccaagagatttgagatcaaacagcacagtctacatgacccctggtgatttgggtactctgcaggaggttaataacgcggacgattatttttcattgggagtgaatcctgcagctgacgatgacgacgatggcccatatgctgatgacagttaaatcctatgaggatataaacagtattaaaaaaatcttaccataaagacatacgacatttcgaggcgtttttgcttttcttttaactttcgttggcacaaactgaaatatatgtggaatgccctctgaaaatatactaggagttttgagcgatccaaacattttcttttctttttttctcttccttctagcgaagtcctcttgcgttagctgtaaacaaaataagtcaatttcattaatgaaaagtgacattatggcggtagctctctctatctttgttcagttatcaacatatagtcatacttaaagatataatagctcatagtcatatatagttctttatacttgaaaaagtgattcctaa

SEQ ID NO: 2197 - DNA, 860 bp, Saccharomyces cerevisiae
aagagcagcaaaaatggattctaagaccccagtcaccttagctaaagtcatcaaagttttaggccgtaccggttctcgtggtggtgttacccaagttcgtgttgagttcttggaagacacttcccgtaccattgtcagaaatgtcaagggtccagttagagaaaacgacattttggtcttgatggaatctgaacgtgaagctcgtcgtttgcgttaaaggtatattaaaaaatttactattggtgctcttcgagcattgttttttttctatatttacaaacaacagcttattttttaatatttctcaaaaaatgaagttcgaatgattattttaattgagtttagtgatgaaatcgattgcaaataatataaacgttggtaagctcatctaaacaatcgaaaggagggatagaagacagtaggtgtttgtgctttggtcggtttttccattcggtgaattcatacatctcctttattaattttaatggattctttacaagggattttcggttgccaaaaacagagaacaaatgcgtagaaatactcaatgatgtcaatttttcaaaaaatgaattaaatgattgaagtcacttaatttttgtggttttttggaggtgggttgagtgtacaactcactataattgatgagatattcgacgaacttgttacttttttggattccagaatgtttactgaattttaagaattaattaatttgaggctaacctgtatggcatggaataacgaatcgacaagaagtctcttactgtaactttctttttttttggtgcatctatcgttaaatacaatttaaatattacattcatgtacttactcaatataataatctgattacttca

SEQ ID NO: 2198 - DNA, 800 bp, Saccharomyces cerevisiae
aaaaaccctgacagtgacaccccgttacacactcacaattaagtagggatgataaagtcaacactaatctacagagaagatgggctgcctctttgtacgtctgtggacaacgaaaatgatccctcattatttgaacaaaagcaaaaggtgaaaatcgtcgtttccagattgacaccacagtctgccacggaggctactttggaaagtggctcctttgagatccattatttgaagaaatccatggtgtactacttcgtcatttgcgaatctggatacccaagaaacttagcattctcataccttaacgatatagcgcaagaatttgaacactcatttgctaatgagtaccccaagcctaccgtaagaccataccagtttgtaaactttgataactttctacagatgacaaaaaagtcatacagtgataagaaagttcaggacaatttggaccaactaaaccaagagcttgtaggtgtcaagcaaatcatgtccaagaacatcgaagacctactttacaggggagattctctcgataaaatgagtgacatgagttcttctttgaaagaaacatccaaaaggtacagaaagtccgcgcaaaagatcaacttcgatctcttgatcagtcaatatgctcctattgtcattgtcgctttctttttcgtctttctcttctggtggatcttcctcaaatagacgtcaccccatcatcccacatcacaaatcccgatcaatttggtccaagtgtataacatagtctagttcagtattagtatagtatggcaatttatttgacataatta

SEQ ID NO: 2199 - DNA, 1255 bp, Saccharomyces cerevisiae
atgtctcaactgccaacagattttgcttcattgatcaagagattccaatttgttagtgtcctcgattccaaccctcaaaccaaagttatgtccttattgggaaccattgacaacaaggatgctattatcacggctgaaaagacgcactttctatttgacgaaaccgtgagaagaccctctcaagatggccgctccactccagttttatataattgtgaaaacgaatattcttgcatcaacggaattcaggaattaaaggagattacttccaatgatatttactactggggtttgtcagtgataaagcaggatatggagtcgaaccctaccgccaagttgaatttaatttggcctgctactccaattcatatcaagaaatatgaacaacaaaactttcatttagtcagagagactcctgagatgtacaagagaattgttcagccttacatcgaagaaatgtgtaataacggtagacttaaatgggtaaacaacattctttatgaaggcgctgagtcagaaagggtcgtttataaagatttttctgaggagaataaggacgacggcttcctaattttacctgatatgaaatgggatggcatgaacttagactctttatatctagttgcgatcgtctacaggaccgatatcaagacaataagggatttaagatattctgacagacagtggttaatcaacttgaacaacaagattagatccattgttcctggttgttacaactatgctgtccatccggatgagttgagaattttggttcactaccaaccttcttattatcatttccacattcacatcgttaacataaagcatcccggtttaggtaatagtattgccgcgggcaaggccatcttgttggaagacatcattgaaatgttaaattatctaggaccagaaggctacatgaacaagacaatcacctacgctattggtgaaaatcatgatttgtggaaaaggggtctggaagaagaactcactaaacaattggaaagagatggtatcccaaaaatacccaagattgtgaacggttttaaataaaggttgttaaaattctcacatcatccacctttttcctactctcattttctttttttgaaagttgtttgttttatataccttagtttcacaacaacataaggcatgcctatttgagattttgtgattaaaaaataatagaatacgtactatataaccgtcggtttaaagtaaataaattaaagactaagaatgaaacaattaa

SEQ ID NO: 2200 - DNA, 2472 bp, Saccharomyces cerevisiae
tatctccttggtgaattagaagccagataatgtcatttgatagaccggaaatatacagtgctcctgttttacaaggagaatctcctaacgacgatgataatactgaaatcataaagtcctttaagaatttcattttggagttcagacttgactcgcaatttatttacagagatcagttaaggaacaacatccttgtgaagaattattctttaacggttaacatggagcatttgatcggatataacgaagacatatataagaaactatcagacgaaccttcagatatcattccattattcgaaaccgcgatcacacaagtggctaaaaggataagtattctaagcagagctcaatctgctaataacaatgacaaagatccagaaaatactagtatggatactgattctctcttattgaactctttaccaacatttcaattaattttaaactccaatgcaaatcagattccattgagagatttggattctgaacacgtctccaagattgtccgtttatcaggtattataatatccacgtcagttttatcttcccgtgccacgtacctttctataatgtgcagaaattgcagacacacaacatcaataacaatcaacaatttcaattctatcacaggcaataccgtcagtttaccacgttcttgcttatctacgattgagagtgaatcttctatggcaaacgagtcgaatattggtgatgaatcgaccaagaaaaattgtggacctgatccatatattattatccatgagtcttcaaagtttattgatcaacagtttttaaaattacaggaaatcccagaactggttccagtaggtgagatgcctagaaacttaacaatgacttgtgaccgatacctaacaaacaaagttattcctggtacgagagtcactatagtaggtatttattccatctataattctaaaaatggtgccggatccggaaggagcgggggtggaaatggaggaagtggtgttgctattagaacaccttatatcaaaatattaggtattcagtccgatgtagaaacctcctctatttggaattcagtaactatgtttactgaggaggaagaagaggaatttctacagctaagtagaaacccgaagctttatgaaattttgaccaactctattgccccctctatttttggtaatgaagatataaaaaaagccattgtatgtttattgatgggtggttccaagaagatattacccgatggtatgaggttaagaggtgatatcaatgtactattattaggtgatccaggtaccgccaaatctcaactattgaaatttgtggagaaagtgtcacctattgcggtatatacatctggtaagggatcttctgcagctgggttaactgccagtgtacaaagagatccgatgacaagagaattttatttggaaggtggtgctatggtgcttgccgatggtggtgttgtatgcatcgatgaattcgataaaatgagagatgaagatagagtggccattcatgaagctatggagcagcaaacaatctccatcgcaaaagctggtatcactacagtgctaaattctagaactagtgttttagcggctgctaatccgatatacggccggtatgatgatttgaagtctcctggtgacaacattgatttccaaactactattttatcccgttttgatatgatttttattgttaaggatgaccataatgaagaacgtgatatttcaatagctaaccacgttattaatattcatacaggaaatgctaatgctatgcaaaaccaacaagaggaaaatggcagtgaaattagtattgaaaagatgaaacgttacattacgtattgtagattgaaatgtgcaccaagactttcaccgcaggccgctgaaaaactgtcatcgaacttcgtcaccattaggaagcaattattaatcaacgaattagagtcaacggaaaggtcgtctattccaattaccattcgtcaattagaagctattattagaataacagaatcattagccaagttagaattaagtcctattgcacaggagagacatgttgacgaagctattagattgtttcaagcttccacaatggacgcagcgtctcaggatccaattggcggcttaaatcaagcaagcggaacatctttgtcagaaatccgtcgttttgaacaagaactaaaaagaagattacctataggctggtctacttcttatcaaactttgaggagagaatttgtagatacacatagattttctcaattagcactggataaggccttatatgccctagagaagcatgaaacaattcaattgagacaccagggacagaatatttacagaagtggtgtatgacaacaataaagtcttagcttgacgccttttctacttgtttgcatgtaatgaatctaaaaaattcgctacaaatacttcattattatatttctatataaattctgtaaacgaaatt

SEQ ID NO: 2201 - DNA, 1026 bp, Saccharomyces cerevisiae
cgagcattatcgcaataaataaggcgtgtaaacgtatgtcagatatagaatcattgggagaggcagcaggtttatttgaggagccagaggattttcttcctcctccaccaaaacctcattttgcagaatatcaaaggtcacacatcacaaaagagtccaaatcagatgttaaagacatcaaactccgtctcgttggaacgtcaccactttggggtcatctcttgtggaatgcaggaatatacaccgcaaatcacttggattctcatccagaattaataaaggggaagactgttttagaattgggtgctgctgctgctttaccttccgttatttgtgctttgaatggggctcaaatggttgtttcaactgattatccagatcctgatttaatgcagaacatcgattataatataaagtctaacgttcctgaagattttaataatgtcagtacggagggttatatttggggaaacgattattctccattgttggcacatatcgaaaaaataggtaacaataatggaaagtttgacttaatcattttaagtgatttagtcttcaatcatacggaacatcacaaattacttcaaacaacaaaggatttattagctgagaaaggtcaggcgttggtagtattttcaccgcatagaccaaaattgttggagaaggatttagaattcttcgaattggctaagaacgagttccatttggttcctcagctaattgaaatggttaattggaaaccgatgtttgacgaagacgaggaaacaatcgaagtcagatctcgtgtttatgcgtactatttaacacatgaaaagtagtaagtgggcggaattggcattctcaacaatcatttttatgtttgtaaaccagtgtcctttgatatgtaacaattaaataaaataagtcatgatggggcacgaattcgcaaaatggtagaaacacagtaaatcgaagaaaattaaataattcgttatagatataaagtagtcgattataaaaacgtaaaaacatgaaggcagggta

SEQ ID NO: 2202 - DNA, 1669 bp, Saccharomyces cerevisiae
aataactatagaaaactaaagtttacgagaggacccaaaagttttgaataacacgtgcctttgattttttgtttactttctttttctagttaattaccaactaaaatgctttcgcttaaaacgttactgtgtacgttgttgactgtgtcatcagtactcgctaccccagtccctgcaagagacccttcttccattcaatttgttcatgaggagaacaagaaaagatactacgattatgaccacggttccctcggagaaccaatccgtggtgtcaacattggtggttggttacttcttgaaccatacattactccatctttgttcgaggctttccgtacaaatgatgacaacgacgaaggaattcctgtcgacgaatatcacttctgtcaatatttaggtaaggatttggctaaaagccgtttacagagccattggtctactttctaccaagaacaagatttcgctaatattgcttcccaaggtttcaaccttgtcagaattcctatcggttactgggctttccaaactttggacgatgatccttatgttagcggcctacaggaatcttacctagaccaagccatcggttgggctagaaacaacagcttgaaagtttgggttgatttgcatggtgccgctggttcgcagaacgggtttgataactctggtttgagagattcatacaagtttttggaagacagcaatttggccgttactacaaatgtcttgaactacatattgaaaaaatactctgcggaggaatacttggacactgttattggtatcgaattgattaatgagccattgggtcctgttctagacatggataaaatgaagaatgactacttggcacctgcttacgaatacttgagaaacaacatcaagagtgaccaagttatcatcatccatgacgctttccaaccatacaattattgggatgacttcatgactgaaaacgatggctactggggtgtcactatcgaccatcatcactaccaagtctttgcttctgatcaattggaaagatccattgatgaacatattaaagtagcttgtgaatggggtaccggagttttgaatgaatcccactggactgtttgtggtgagtttgctgccgctttgactgattgtacaaaatggttgaatagtgttggcttcggcgctagatacgacggttcttgggtcaatggtgaccaaacatcttcttacattggctcttgtgctaacaacgatgatatagcttactggtctgacgaaagaaaggaaaacacaagacgttatgtggaggcacaactagatgcctttgaaatgagagggggttggattatctggtgttacaagacagaatctagtttggaatgggatgctcaaagattgatgttcaatggtttattccctcaaccattgactgacagaaagtatccaaaccaatgtggcacaatttctaactaagtcgccctcagtccgctcattttagctgaattttctaatgttatttttcatcagcaaaacttaacagaacgttaatttatctaccccttttagttcattatctcttttttatccaacattttacagagatctctcacttaagtctaagtaaagacattattttatatggtacacttatagaatatacgataataataataaaaactatgtaacataa

SEQ ID NO: 2203 - DNA, 897 bp, Saccharomyces cerevisiae
aaagaacttaaacaacaacaaacaaaaaattaagttacaatgccagcattattaaaaagattattgtttcaagtgggtcctcatccaaacgaaagaacattcaccttatcctctgtttcaactgatgggcactatatttccttgagaccatttgttaagccaagcggtgatgagttatcttttcctttcgaatgggcctttgccggtacaaacgaaacagttaaagctaatgatcaaggaaacggtgtcgttactcaagatttcaatttctggttggatacaaatgtgtacttgaacgttccaaacacccatcgtggcgaagtgaacaccacttggaaaaattgggattctggttgtgtcgaggaaacaggcgctgtttacccattcggtgccgacaaagaaagcgtctctttcagagaattgtggcaaccagttgacccatcaagagaagatctagtcatcgtctcaccaaacaatgagaagttctcgtcgaatgctaggtcaattgtcctcaaagttactgacgaagcttatgatggtttggttattgttattggtagatggattcaagggtttttgtcccaaaagaataataacactattgaaggcttgaacttcatcagattacttgaaaaagattcaggtaaatctgagttcttattaagctacggtaaggaagtaaacaaaattccacaaagctacgaaaatttgaagaaaggttccactgtaaccagcaatgggttgaactgggaagttattgaatatcacgcttaataaaggagaataaatcgttttctactttcttctgctgctataataagcacctatgggatctatatagtatttttataacgatagactttataaaagaaaatacctaagtgaaaatttggtgaa

SEQ ID NO: 2204 - DNA, 1335 bp, Saccharomyces cerevisiae
atgccatctcatttcgatactgttcaactacacgccggccaagagaaccctggtgacaatgctcacagatccagagctgtaccaatttacgccaccacttcttatgttttcgaaaactctaagcatggttcgcaattgtttggtctagaagttccaggttacgtctattcccgtttccaaaacccaaccagtaatgttttggaagaaagaattgctgctttagaaggtggtgctgctgctttggctgtttcctccggtcaagccgctcaaacccttgccatccaaggtttggcacacactggtgacaacatcgtttccacttcttacttatacggtggtacttataaccagttcaaaatctcgttcaaaagatttggtatcgaggctagatttgttgaaggtgacaatccagaagaattcgaaaaggtctttgatgaaagaaccaaggctgtttatttggaaaccattggtaatccaaagtacaatgttccggattttgaaaaaattgttgcaattgctcacaaacacggtattccagttgtcgttgacaacacatttggtgccggtggttacttctgtcagccaattaaatacggtgctgatattgtaacacattctgctaccaaatggattggtggtcatggtactactatcggtggtattattgttgactctggtaagttcccatggaaggactacccagaaaagttccctcaattctctcaacctgccgaaggatatcacggtactatctacaatgaagcctacggtaacttggcatacatcgttcatgttagaactgaactattaagagatttgggtccattgatgaacccatttgcctctttcttgctactacaaggtgttgaaacattatctttgagagctgaaagacacggtgaaaatgcattgaagttagccaaatggttagaacaatccccatacgtatcttgggtttcataccctggtttagcatctcattctcatcatgaaaatgctaagaagtatctatctaacggtttcggtggtgtcttatctttcggtgtaaaagacttaccaaatgccgacaaggaaactgacccattcaaactttctggtgctcaagttgttgacaatttaaagcttgcctctaacttggccaatgttggtgatgccaagaccttagtcattgctccatacttcactacccacaaacaattaaatgacaaagaaaagttggcatctggtgttaccaaggacttaattcgtgtctctgttggtatcgaatttattgatgacattattgcagacttccagcaatcttttgaaactgttttcgctggccaaaaaccatga

SEQ ID NO: 2205 - DNA, 904 bp, Saccharomyces cerevisiae
tggaaagtaaagagtagacaagctcggaaacatggaaaatagcatgatgtttatatcgcgttccttgcggagacccgttactgctttgaactgcaatttacaaagcgttagaacagtcatataccttcataagggtccgagaattaatggtttgagacgagatccagagtcgtacttgagaaatcctagcggggtactctttactgaagttaacgcaaaagagtgtcaagacaaagttagatccatactacaattgcccaagtacggaataaatttatcaaacgaactgattttgcagtgtttaacacataagtcgttcgcacacgggtcaaagccatacaacgaaaaactgaatctgctaggagcacagtttttgaaactacagacgtgcattcattcgttaaagaatggttcgccggccgagagttgcgagaacgggcaactttctttgcagttcagcaatctgggaacaaaattcgctaaggaattaacgtccaaaaacacagcatgcacattcgttaaattacataatctagaccctttcatattttggaagatgagagacccaataaaagatggccacataaatggtgaaaccacgatttttgctagtgtcttgaacgcatttattggtgcaattctgtcaacgaatggatctgaaaaagcagctaaatttatccaaggaagtttgctggataaagaagatcttcattccttggttaacattgctaatgaaaatgtagcatctgcaaaggcaaaaatatccgacaaggaaaataaagcatttctgtgaagatacaaaaaatatagttgatggttcactggccaaaaatgtataaaagaaaaatttatctgtaaatagtgatcgaaataaaataagataataactaaagaatatatatga

SEQ ID NO: 2206 - DNA, 462 bp, Saccharomyces cerevisiae
atgaactctgaacagctgctgcataactatgtttcggattcgctactcactactctgataagttttcaagagttcaagcagcaactacagtcgtacacgagcgacgagcaacaactgcaacattggtacgaattgcttcaggccagggatgcgcgagtgacctctgagttagaagcacgaatcaagcagtttttcataacgttgcgctctagattactgcgatttctggaaagcgagcaactatcacactcccttagcctcgagacactgatcgacgcgctgtacaagattaatgacctgttgcaacagcgtttgcagattctggatgatgctattcaggaaaagacctcggaactagcagaatttgaaaatatggttcgctcaccgagtgcaggagacaatgccattcctggcctattacaaattatacaatcttatattaatctattagaggaaaactag

SEQ ID NO: 2207 - DNA, 1859 bp, Saccharomyces cerevisiae
gcatgcaaggttgcaatttaggattcgagctgtctagttgatcctccggagtgtaaaaactgattttcaatgagtggtaacacaactaacgtgcatgagactagagccaagtttgcagagacgctgcaaccgaggattggtggcaatactacaaaagtgatacgagctgctttggaaaagaacgaagctgaaagcggggtgtctgaggataatgataacgggtcattggagaaagttaacgtagctacttcgccgcttttgacatcaacaccgcccacaatctcaaaggcgttggtgaaattgtacccttatttaattctcattgacgaattcctaaacgttgttacatggacaggaaagaatatttggagcagtgttttgatgctgtgtctctttattactaccgttgagtattttgaaacgctggtgaagtactttggacatcttgccatcattgctattttgtggggttattccctattggacaattatattgagggtacgttgagctcctcaccaacattagaagatattgctctcttaatgaacagagtatccttgaagtcagatattttgctctcccccatggttaaccttggaacgcaagatattcaacggcttctatatactacggtcatattatctccaatatacgtgatgataacctggctacttttaccaccgagaagcttgatgctgatggtgggcatgttccttttaacgtatcactcaccatggtctaaagtagcaagaaggcttttatggaagtttaagattgtcaggctgcttgttttctacgtcacgggtttagaccttggtggaataaataaggaccagggtatttttgctacagtgcagaagcaagtgaaaaagttggcatcaacagaaaacagtaatggcgtattatccgattccaagcctatccgttttacttatgttttgtacgagaaccagcgtcgttggttaggtattggatggaagcctagtatgttgagttatgagaggactccatggaccgatgaatttttgaatgaggctccctctcctgaaaacttccatctacctgaagagactaacactatggtttggagatgggtcgacaagacatggaggctagacatgactaatgacggtgccattcaagtgcccaattcaaaggcaagaacttccgcagatccctcccctgacgagggatttatatattacgacaatacctggaaaaaaccaagtaaagaagattccttttctaaatatacaagaagaagaagatgggtaagaaccgcagaattggtcaaaacttctgactttgatgaaagcgtgataaattcgaatagaaattctgccattgaacaaaaggttgaagaaaacagcacgaatggtttaaccgctgagcaagagcttgggagcaacaagcaagagaaagataatgcgaaaaaagtaggagagcctacaacagaagagacaaaagaatttgccgaagcatcaaacatcaacgaaggcgagtttgaaagaatttcctcgaccgatgaagaagttttaaaatctagggcaagagatcgactggcaaaagtattagatgatactgaagagaaagagcaatcaaatccaaccattggtcgcgatagcaagaaggccgtatgatgctcgctcccgtttttacctttacataatataatctctaatttactttattacacaaatggtaactccctttaaataaacttaaaaaagaacgtatagaactctcttcttcaatgaatagtaatccaattttttttattaactatacaacgttatgactttaaaaattaaaaaatatgtttatgagtagtaagaaaaacaaaaggaaacaaaaacaa

SEQ ID NO: 2208 - DNA, 1560 bp, Saccharomyces cerevisiae
ggtacgctttctcatagttaatagagtcagtaattcatttcattttttgcagaaaggaatttcttcacctaatttagaatttcatcaacatttattgtatctgcatggtataacaaattagaaaaatttggaagggaaaaaaaaactgttgcgtcaattacttataccagggatagaaaaaaaaaaaggaaacatggatcccacaagagctccggatttcaaaccgccatctgcagacgaggaattgattcctccacccgacccggaatctaaaattcccaaatctattccaattattccatacgtcttagccgatgcgaattcctctatagatgcaccttttaatattaagaggaagaaaaagcatcctaagcatcatcatcaccatcatcacagtcgtaaagaaggcaatgataaaaaacatcagcatattccattgaaccaagacgactttcaaccactttccgcagaagtgtcttccgaagatgatgacgcggattttagatccaaggagagatacggttcagattcaaccacagaatcagaaactagaggtgttcagaaatatcagattgctgatttagaagaagttccacatggaatcgttcgtcaagcaagaaccttggaagactacgaattcccctcacacagattatcgaaaaaattactggatccaaataaactgccgttagtaatagtagcatgtgggtctttttcaccaatcacctacttgcatctaagaatgtttgaaatggctttagatgcaatctctgaacaaacaaggtttgaagtcataggtggatattactcccctgttagtgataactatcaaaagcaaggcttggccccatcctaccatagagtacgtatgtgtgaattggcctgcgaaagaacctcatcttggttgatggtggatgcatgggagtcattgcaaccttcatacacaagaactgccaaggtcttggatcatttcaatcacgaaatcaatattaagagaggtggtgtagctactgttactggagaaaaaattggtgtgaaaataatgttgctggctggtggtgacctaatagagtcaatgggtgaaccaaacgtttgggcggacgccgatttacatcacattctcggtaattacggttgtttgattgtcgaacgtactggttctgatgtaaggtcttttttgttatcccatgatattatgtatgaacatagaaggaatattcttatcatcaagcaactcatctataatgatatttcttccacgaaagttcgtctatttatcagacgcgccatgtctgtacaatatttgttacctaattcggtcatcaggtatatccaagaacatagactatatgtggaccaaaccgaacctgttaagcaagttcttggaaacaaagaatgatttgccgtccggaattgcttcgttctttctttcatctttctctttacaatttccaattttcccctacaggaattaattggagggtacaagcgagtagaaatgtgacatatgacttacctatctgtgttttagtatagtttttttttctgtagtataattca

SEQ ID NO: 2209 - DNA, 2175 bp, Saccharomyces cerevisiae
cgagtagcgaataatgtcttcagttgatgtactgttaacagtaggtaagttggatgcctcattggcgttactgactactcaggatcatcatgttattgagtttcctacagtattattaccagaaaatgttaaagctggatctatcataaaaatgcaagtttcacaaaatttagaggaggaaaaaaaacaaaggaatcattttaagagtatacaagccaaaattttggagaagtatggtacccataaaccggagagcccagttttgaaaattgttaacgttacgcaaacgagctgtgttctagcatgggatccattgaaacttggctcagcaaaattgaaatcactgatcctttataggaagggaatacgttcaatggtaattccaaatccattcaaagtgactaccacgaaaatatccggtctttccgttgatacgccatacgaatttcaattgaaactgataaccacgtcaggaacattatggtctgaaaaggttatattgcgtacacataagatgactgacatgtctggtatcactgtatgtttgggtccattggatccattgaaagaaatttcagacttacagatatcccaatgtttgtctcacatcggggcgagacctttacaacgtcatgttgcgatagatactacgcattttgtctgtaacgatctagacaatgaagaaagcaatgaagagcttataagggcaaaacataacaacataccaattgtcagaccggaatgggtgagagcttgtgaggttgagaaaagaatcgttggtgttagaggattttacttagatgcagatcaaagtatactgaaaaactacacattcccaccagttaatgaggaagaactttcgtactcaaaggagaatgagccggtagccgaagtagcggatgaaaataagatgcccgaggacacaacagatgtcgaacaggttgcatcacctaatgacaatgagagtaatccttcagaagctaaggaacaaggagaaaagagtggacatgaaactgccccagtaagtcctgtagaagatccattgcatgcttcgacggctttggagaatgaaaccaccatcgaaaccgtcaacccctccgtaagaagtttgaaaagcgaacctgttggtactcccaatatagaggaaaacaaagcggactcttccgcagaagccgtggtagaagaaccgaatgaagctgtggctgaaagttctccaaatgaagaagcaacgggacagaaaagtgaggataccgatacacattctaacgaacaagctgataatggatttgtacagactgaagaagtagctgaaaacaacataaccacagaaagtgcaggggaaaataacgaacctgcagatgatgcagcaatggaatttggacgtccagaagctgaaattgaaactccagaagtaaatgagtctatagaagatgccaatgaacctgcggaggattccaatgaacctgtggaggattccaacaaacctgtgaaggattccaacaaacctgtggaggattccaacaaacctgtggaggattccaacaaacctgtggaggattccaacaaacctgtggaggatgccaatgaacctgtggaagataccagtgaacctgtggaggatgccggtgaacccgtacaagaaaccaacgagtttactaccgacattgcctctccaagacatcaagaagaagatatagaacttgaagccgaacctaaagatgctaccgaaagtgttgcagtcgagccatccaatgaagatgtaaaaccagaagaaaaaggttcagaggcagaagacgatatcaacaacgtttccaaggaggctgcctctggtgagagtactacccaccaaaaaactgaggcctctgcttctcttgaaagcagtgccgtcacggaagaacaagagacaacggaagccgaagtaaatacagatgacgttttgtccactaaagaagctaaaaaaaatactggcaacagcaacagtaataagaagaagaataagaagaataagaagaaagggaaaaagaaatgattaatggatgccttcaatgagttccacgacgcacgtttattttttcgactgagaatccctcagcaaatataatctattttttatatatctgtgtatatgtaagcatgtataactagttacaaatatgataactgctttggcgatca

SEQ ID NO: 2210 - DNA, 1745 bp, Saccharomyces cerevisiae
caccccagtttttacactcttttttcctgtgtttggtttagcacaactttccaataaccaagttggtttcagatcatccccatattattttctagtttcatttacttaccaaactcaccattcaaggctttcaaattaagttacgagtacagtggaccatttttttctgattcttcatattttccgttataagtcttataaggaaggtatacatttatattgcgaatttgaaaaataatttaaagctgactttgcgttttaggtaggctagaaaagaatacaactatccctaaacacattctagattcacgaagacgcctctgcctcaaagacatactatatttttactctcgttgaacaaatagtaccattatttcgctactttcgttgaagattggacatataaaatacgcaaatcatagtatgttgtctttcacaaccaagaatagtttccgcttattacttttaatactgtcatgcatatcgacgatacgcgcacaatttttcgtgcaatcatcatcttcgaattcttcagcagtatctactgcacgttcttccgtaagtagagttagttcttcaagttccattttgtcatccagtatggtttcttcctcaagtgctgactcatcttcccttacttcatcgacatcaagtaggtccctcgtgtcacatacgagttcgtctaccagcattgcctccatatcgttcacatcattcagtttctcatcagattcaagcaccagcagctcttcctctgcttcttcagattcttcatcctcctcatccttttccatctcttcgacatccgcaacttctgaatcatcgacgtcttctacgcaaacgtcaacatcatcttcatcctcactgtcgtcaacgccgtcctcttcatcatccccatcaacaatcacttctgcaccttcaacctcctccacaccatccactactgcctataatcaaggaagcactatcaccagtattattaacggtaagacgattctctcaaatcattatactaccgttacgtacacaccatcagcaaccgctgattcaagcaataaatccaaaagttcgggtctttctaaaaaaaatagaaacatcgtcattggttgtgtggttggtattggtgtaccactgattctggtgatactggctttaatttacatgttttgtatccaatcatcaaggacggactttattgactcagatggtaaggtcgttacggcatatagagctaacaaatttacgaaatggtggtatatgcttttgggtaagaaagttagtgatgaataccactccgattcaccattaggtggtagtgcatcgtccgcaggtggtttagacctagatgaagcagatgatgtgatggagcaaagctcccttttcgacgtcagaataagagatagcgatagcgtattaccaaacgccaacaccgccgaccataataataccaatagcggtggagagcctataaatagtagcgttgcgtcaaatgacataatagaagaaaaattctatgatgaacaaggtaacgaattatcaccacgaaattattaatcatatccattcatatcatttagtgcttatggctacttttcattcctcaattattgtaaattgaccatcttaattatatttctgatattgagtaggtggacttcattagtatttttacaaatattatcaccttcttatgtaggattagcattacataccctctaattaaaaaaagttaacattaattacat

SEQ ID NO: 2211 - DNA, 2275 bp, Saccharomyces cerevisiae
aaatcattaacgagatggccaaaagagttgccgatgcgcaaatacagagagaaacgtacgattctaacgagtctgacgatgacgtgactccctccactaaggttgcgtcatctgctgtgatgaatagaagaaaaattgccatgccaaagcgcaggatggcgttcaaaccttttggttctgcaaaatcggatgaaaccaagcaggctagttcctttagcttcctgaaccgggcggacggcactggagaagctcaggttgataatagccctaccacagaaagcaattccagactaaaagcattgaacctccagttcaaggctaaggttgatgacttagttctaggcaagccgttagcggacttgaggccccttttcaccaggtacgaattatacataaagaatatcttagaagctcccgtgaaatctatcgagaatccaacgcagacaaagggaaatgatgctaaacctgccaaagtagaagatgtccaaaaaagttccgattcttcatctgaagatgaggttaaggtggagggacccaagttcacaatagatgctaaaccgcctatttcagattccgttttctcatttggcccaaaaaaagaaaatcgcaagaaagatgaaagtgatagcgaaaacgatatagaaatcaagggccctgaatttaaattttctggaactgtatcaagtgatgtatttaagctgaatccaagcaccgataaaaatgaaaagaaaaccgagactaatgctaaaccattttcattttcttcggccacttcaactactgaacaaacgaagagtaaaaatcccctttcattgacagaagctaccaagaccaatgtggacaacaacagtaaagccgaggcttccttcacttttggaacaaaacatgctgcggattctcaaaataataaaccatcttttgtatttggtcaagcagctgcaaaaccatcgctagaaaagagctcattcacgtttggttcaacaacaattgaaaaaaaaaatgacgaaaactcaacctctaactcaaaacctgaaaagtctagtgatagcaatgattcaaacccatctttttccttttccatacccagtaagaatacacctgatgcatctaagccatcttttagttttggggtcccaaactcttccaaaaacgaaacttcaaaaccggtattttcgtttggtgcagcaacaccatcggccaaagaagctagtcaggaagatgacaacaacaacgttgaaaaaccttcctctaagcctgccttcaatttaatatctaacgctggtaccgagaaagagaaggaaagtaaaaaggactcaaagccagctttttcatttggcatatcaaacggaagtgaaagcaaagactctgacaaaccctctttaccctctgcggttgatggtgaaaatgacaagaaagaagcaacaaaacctgctttttcgtttggaataaatacaaatactactaaaaccgcggatactaaagctccaacttttacatttggctcctctgcactcgctgacaataaagaggatgttaagaaacctttttcattcggtacctcccagcctaataatactccatccttctcattcggaaaaacaacagcaaacttgcctgctaattcttcaacatctcctgctccctctataccatcgacggggttcaaattttctttgccatttgaacaaaaaggtagtcaaacaactacaaatgatagcaaggaagaatcaacaacagaagcaactggaaatgagtcgcaagatgcaaccaaagtagatgctaccccagaagaatcaaagccaataaacttgcaaaacggtgaggaagacgaagtggctttattttcgcaaaaagcaaaattaatgacattcaatgctgaaaccaaatcgtacgattcaagaggcgtaggcgaaatgaagcttttgaagaaaaaggacgatccttctaaagtgcgcctactttgtaggtctgacggtatgggtaatgtattactaaatgcaactgttgtagactccttcaaatatgagcctttagctcccggaaatgataatctcattaaagctcctactgttgcggctgatgggaaacttgtaacttatatcgtcaagtttaagcagaaggaagaaggccgctcatttacgaaagctattgaagatgctaaaaaagaaatgaaataagagtaaatacagttaacaattttaaatagaatagaaccctcatattttgtagctcaaggttatagttgagcaaataaagaatacaaaatttattccaa

SEQ ID NO: 2212 - DNA, 1087 bp, Saccharomyces cerevisiae
ataagcggaatacctttaaacatcctgcaaacagtctaataaatacgtataataagtttgaaatgggaggcattcgtgaaaagaaagctgaatactttgctaaattaagagaatacttggaagaatacaagtctttgttcgttgttggtgttgacaatgtttcttcccaacaaatgcacgaagtcagaaaggaattgagaggcagagctgtcgtcttgatgggtaagaacaccatggttagaagagccatcagaggtttcttatccgacttgccagacttcgaaaagttgttgccttttgtcaaaggtaacgttggtttcgttttcactaacgaaccattgactgaaatcaagaacgttattgtctctaacagagttgctgctccagccagagctggtgccgttgctccagaagacatctgggttagagccgtcaacactggtatggaaccaggtaagacttctttcttccaagctttgggtgtcccaaccaagattgccagaggtaccattgaaattgtttctgatgtcaaggtcgttgacgccggtaacaaggtcggtcaatctgaagcttccttgttgaacttgttgaacatctctccattcactttcggtttgactgttgttcaagtttacgacaacggtcaagtgttcccatcttctatcttggatatcaccgatgaagaattggtttctcacttcgtttccgctgtcagcaccattgcttctatctctttggctattggttacccaaccttgccatctgtcggtcacactttgatcaacaactacaaggacttgttagctgttgccattgctgcttcctaccactaccctgaaattgaagatttggttgacagaattgaaaacccagaaaagtacgctgctgctgctccagctgctacctccgctgcttccggtgacgctgctccagctgaagaagctgctgctgaagaagaagaagaatctgatgacgacatgggtttcggtttattcgattaagaagtgcaacatgaattattaagttaatttcatatatactattttataattaaataacattaatcctcattgattcattttattca

SEQ ID NO: 2213 - DNA, 6138 bp, Saccharomyces cerevisiae
cagaacactacagctgttttaaccgactacgaagttctccattctcgaacactagccttcatttaccaaacaggaactagcgtatatcattagtccttattcgaaaagagattggtagatatttattgtagtttgtgagaaggagaaaatactgtcattggactgatagttagaggacattaacctctcttacgttcgctcaaaaaaattaaaataagcaagtagctgaaatcaagtctttcatacaacggtcagaccatgaacactgatcaacaaccttatcagggccaaacggactatacccagggaccaggtaacgggcaaagtcaggaacaagactatgaccaatatggccagcctttgtatccttcacaagctgatggttactacgatccaaatgtcgctgctggtactgaagctgatatgtatggtcaacaaccaccaaacgagtcttacgaccaagactacacaaacggtgaatactatggtcaaccgccaaatatggctgctcaagacggtgaaaacttctcggattttagcagttacggccctcctggaacacctggatatgatagctatggtggtcagtataccgcttctcaaatgagttatggagaaccaaattcgtcgggtacctcgactccaatttacggtaattatgacccaaatgctatcgctatggctttgccaaatgaaccttatcccgcttggactgctgactctcaatctcccgtttcgatcgagcaaatcgaagatatctttattgatttgaccaacagactcgggttccaaagagactccatgagaaatatgtttgatcattttatggttctcttggactctaggtcctcgagaatgtctcctgatcaagctttactatctttacatgccgactacattggtggcgatactgctaactataaaaaatggtattttgctgctcagttagatatggatgatgaaattggttttagaaatatgagtcttggaaaactctcaaggaaggcaagaaaagctaagaagaaaaacaagaaagcaatggaagaggccaatcccgaagacactgaagaaactttaaacaaaattgaaggcgacaactccctagaggctgctgattttagatggaaggccaagatgaaccagttgtctcccctggaaagagttcgtcatatcgccttatatctgttatgttggggtgaagctaatcaagtcagattcactgctgaatgtttatgttttatctacaagtgtgctcttgactacttggattcccctctttgccaacaacgccaagaacctatgccagaaggtgatttcttgaatagagtcattacgccaatttatcatttcatcagaaatcaagtttatgaaattgttgatggtcgttttgtcaagcgtgaaagagatcataacaaaattgtcggttatgatgatttaaaccaattgttctggtatccagaaggtattgcaaagattgttcttgaagatggaacaaaattgatagaactcccattggaagaacgttatttaagattaggcgatgtcgtctgggatgatgtattcttcaaaacatataaagagacccgtacttggttacatttggtcaccaacttcaaccgtatttgggttatgcatatctccattttttggatgtactttgcatataattcaccaacattttacactcataactatcaacaattggtcgacaaccaacctttggctgcttacaagtgggcatcttgcgcattaggtggtactgtcgcaagtttgattcaaattgtcgctactttgtgtgaatggtcattcgttccaagaaaatgggctggtgctcaacatctatctcgtagattctggtttttatgcatcatctttggtattaatttgggtcctattatttttgtttttgcttacgacaaagatacagtctactccactgctgcacacgttgttgctgctgttatgttctttgttgcggttgctaccatcatattcttctccattatgccattgggggggttgtttacgtcatatatgaaaaaatctacaaggcgttatgttgcatctcaaacattcactgctgcatttgcccctctacatgggttagatagatggatgtcctatttagtttgggttactgtttttgctgccaaatattcagaatcgtactactttttagttttatctttgagagatccaattagaattttgtccaccactgcaatgaggtgtacaggtgaatactggtggggtgcggtactttgtaaagtgcaacccaagattgtcttaggtttggttatcgctaccgacttcattcttttcttcttggatacctacttatggtacattattgtgaataccattttctctgttgggaaatctttctatttaggtatttctatcttaacaccatggagaaatatcttcacaagattgccaaaaagaatatactccaagattttggctactactgatatggaaattaaatacaaaccaaaggttttgatttctcaagtatggaatgccatcattatttcaatgtacagagaacatctcttagccatcgaccatgtacaaaaattactatatcatcaagttccatctgaaatcgaaggtaaaagaactttgagagctcctaccttctttgtttctcaagatgacaataattttgagactgaatttttccctagggattcagaggctgagcgtcgtatttctttctttgctcaatctttgtctactccaattcccgaaccacttccagttgataacatgccaacgttcacagtattgactcctcactacgcggaaagaattctgctgtcattaagagaaattattcgtgaagatgaccaattttctagagttactcttttagaatatctaaaacaattacatcccgttgaatgggaatgttttgttaaggatactaagattttggctgaagaaaccgctgcctatgaaggaaatgaaaatgaagctgaaaaggaagatgctttgaaatctcaaatcgatgatttgccattttattgtattggttttaaatctgctgctccagaatatacacttcgtacgagaatttgggcttctttgaggtcgcagactctatatcgtaccatttcagggttcatgaattattcaagagctatcaaattactgtatcgtgtggaaaatcctgaaattgttcaaatgtttggtggtaatgctgaaggcttagaaagagagctagaaaagatggcaagaagaaagtttaaatttttggtctctatgcagagattggctaaattcaaaccacatgaactggaaaatgctgagtttttgttgagagcttacccagacttacaaattgcctacttggatgaagagccacctttgactgaaggtgaggagccaagaatctattccgctttgattgatggacattgtgaaattctagataatggtcgtagacgtcccaagtttagagttcaattatctggtaacccaattcttggtgacggtaaatctgataaccaaaaccatgctttgattttttacagaggtgaatacattcaattaattgatgccaaccaagataactacttggaagaatgtctgaagattagatctgtattggctgaatttgaggaattgaacgttgaacaagttaatccatatgctcccggtttaaggtatgaggagcaaacaactaatcatcctgttgctattgttggtgccagagaatacattttctctgaaaactctggtgtgctgggtgatgtggccgctggtaaagaacaaacttttggtacattatttgcgcgtactttatctcaaattggtggtaaattgcattatggtcatccggatttcattaatgctacgtttatgaccactagaggtggtgtttccaaagcacaaaagggtttgcatttaaacgaagatatttatgctggtatgaatgctatgcttcgtggtggtcgtatcaagcattgtgagtattatcaatgtggtaaaggtagagatttgggtttcggtacaattctaaatttcactactaagattggtgctggtatgggtgaacaaatgttatctcgtgaatattattatctgggtacccaattaccagtggaccgtttcctaacattctattatgcccatcctggtttccatttgaacaacttgttcattcaattatctttgcaaatgtttatgttgactttggtgaatttatcttccttggcccatgaatctattatgtgtatttacgataggaacaaaccaaaaacagatgttttggttccaattgggtgttacaacttccaacctgcggttgattgggtgagacgttatacattgtctattttcattgttttctggattgccttcgttcctattgttgttcaagaactaattgaacgtggtctatggaaagccacccaaagatttttctgccacctattatcattatcccctatgttcgaagtgtttgcgggccaaatctactcttctgcgttattaagtgatttagcaattggtggtgctcgttatatatccaccggtcgtggttttgcaacttctcgtataccattttcaattttgtattcaagatttgcaggatctgctatctacatgggtgcaagatcaatgttaatgttgctgttcggtactgtcgcacattggcaagctccactactgtggttttgggcctctctatcttcattaatttttgcgcctttcgttttcaatccacatcagtttgcttgggaagatttctttttggattacagggattatatcagatggttatcaagaggtaataatcaatatcatagaaactcgtggattggttacgtgaggatgtctagggcacgtattactgggtttaaacgtaaactggttggcgatgaatctgagaaagctgctggtgacgcaagcagggctcatagaaccaatttgatcatggctgaaatcataccctgtgcaatttatgcagctggttgttttattgccttcacgtttattaatgctcaaaccggtgtcaagactactgatgatgatagggtgaattctgttttacgtatcatcatttgtaccttggcgccaatcgccgttaacctcggtgttctattcttctgtatgggtatgtcatgctgctctggtcccttatttggtatgtgttgtaagaagacaggttctgtaatggctggaattgcccacggtgttgctgttattgtccacattgcctttttcattgtcatgtgggttttggagagcttcaactttgttagaatgttaatcggagtcgttacttgtatccaatgtcaaagactcatttttcattgcatgacagcgttaatgttgactcgtgaatttaaaaacgatcatgccaatacagccttctggactggtaagtggtatggtaaaggtatgggttacatggcttggacccagccaagtagagaattaaccgccaaggtaattgagctttcagaatttgcagctgattttgttctaggtcatgtgattttaatctgtcaactgccactcattataatcccaaaaatagataaattccactcgattatgctattctggctaaagccctctcgtcaaattcgtcccccaatttactctctgaagcaaactcgtttgcgtaagcgtatggtcaagaagtactgctctttgtactttttagtattggctatttttgcaggatgcattattggtcctgctgtagcctctgctaagatccacaaacacattggagattcattggatggcgttgttcacaatctattccaaccaataaatacaaccaataatgacactggttcccaaatgtcaacttatcaaagtcactactatactcatacgccatcattaaagacctggtcaactataaaataatacaatcaatacttgcttgaacgcttgattttactgatattctatccaaaagcaagtagaccagaaactctcaagatgttgcaaataccgttcgatgtttttggtttagattgttttaatgttgatgcttttttacttatttttggaagcgtctttttaatttagttttatattataggtatatgaatgtgtttatgccaataagggtttttttgtacagttatgtgattataaacagtcttttgtcta

SEQ ID NO: 2214 - DNA, 527 bp, Saccharomyces cerevisiae
tctatattattgacgtaaccaacaaaaaagtatcagaatggctaaacaatcattagacgtttcctccgacagaagaaaggctagaaaggcttatttcaccgccccatcctcccaacgtcgtgttttgctatctgctccattatctaaggagttgagagctcaatacggtatcaaggccttgccaatcagaagagatgatgaagttttggttgttcgtggttccaagaagggtcaagaaggtaagatttcatctgtttacagattgaaatttgccgttcaagttgacaaggttaccaaggaaaaggtcaacggtgcttccgttccaattaacttgcacccatccaagcttgtcattactaaattacatttggacaaggacagaaaagctttgatccaaagaaagggcggtaagttggaataaattatgtaattccctgaaaacttcctcgaaatttattgcactttttttactcaaaccatttaataatcatatgtaaaacgtataaaatagtatccattccactgta

SEQ ID NO: 2215 - DNA, 783 bp, Saccharomyces cerevisiae
aagactataccattataaaaacgcataagaaacagtttcatcatgattgaccgcactaaaaacgaatctccagcttttgaagagtctccgcttacccccaatgtgtctaacctgaaaccattcccttctcaaagcaacaaaatatccactccagtgaccgaccataggagaagacggtcatccagcgtaatatcacatgtggaacaggaaaccttcgaagacgaaaatgaccagcagatgcttcccaacatgaacgctacgtgggtcgaccagcgaggcgcgtggttgattcatatcgtcgtaatagtactcttgaggctcttctactccttgttcgggtcgacgcccaaatggacgtggactttaacaaacatgacctacatcatcggattctatatcatgttccaccttgtcaaaggtacgcccttcgactttaacggtggtgcgtacgacaacctgaccatgtgggagcagattaacgatgagactttgtacacacccactagaaaatttctgctgattgtacccattgtgttgttcctgattagcaaccagtactaccgcaacgacatgacactattcctctccaacctcgccgtgacggtgcttattggtgtcgttcctaagctgggaattacgcatagactaagaatatccatccctggtattacgggccgtgctcaaattagttagttggctctgcctatacgcatatatgtatatatatatatatatatatgtatgtatgtgtatatgtatatgtacgtataccttacatcatca

SEQ ID NO: 2216 - DNA, 2017 bp, Saccharomyces cerevisiae
aatacccaatatcctctttctacttgagaattttttcgattctacatgaagtatgatacaatcagacgaagataatttggactcttctgaaacgacagcatcaacttcatatagtggtacttcctctgtatcatccagactacaactaagaacatccttgttttttgaaaatcttaatggagcacatgggaaccccgatgcggagacagagatggctactgttgcctatgaaaccacaagtagaggtcaaggatttgctgtatacatcaacaatgaaaggttttctcaaataatgggagcatccacaagctctagctctagtagcaactcgtcctctattacacaatttcacgatacccaagataataatataccaagcaacactactgtaaggccaacttcacttcgacgagacaacgaggataccgtaccgttaaggaacgtaactccttcacaaaacgcggcggtacggccagaaagagcagtgaattcaccatcttcgcagagattaagttgcgcactgacaatatcaacttcagttcttatgggagaagatgttgaaggaagccctatagagcaagagcatagtagggtcgtatcttcattatactcatctttggcgaatcgcgggaacgacgagtcaaagaatggaacacctccacgtcctacctcaattgaacctaatgaaacaacggaacactcatttttctcataccattacgatgacaccttagaaccagatgttgaagaggcagtgaggctaacgaagaataaaacttctaatgttaattttataagctcaactggcagtaaaggtgaaggcgagaccgaggatgaagtcatagatcaatacgaacctgtgaatgaatcaaaatttataccgcacaaactaaaaattccagagaaggctggatcaataaagtcgtcgacaagtgatgattcgcattcgccaggtgcgccaggtacgtcggcaaggaagattaaaattcctcagagtccatcgttaattggtaacatattgattccttcacacaatagtgacagtagtaacgaaagttctcctaaagaccatatagggcataataatgaagaaaaattcagttcaaaatctacgcgcaagccctccacatccctagaagaagaaggtccaccaattggactaccttcaattcccgtattaagaagtgtgtccggaccaagcaaatggacgaagacacctttacgcttagaatctggaaattcaactaagtctgatccattttcacgctatgaaggacacaagacgccctctccattgaccaagatgaacaagaagaaaaataaaacgttgccagaacatggacaacccctcgtgctagctccaattaaatctcaaagctcggagtcagacacgggacagaactccattatagaaaagccagctcgaagcatacgacgaaagcaacaagaaaaaactgataataggaaagaagacaggcacgatgctgaaaatatagacctggaggcgagaatgccaattcaacatatcgataccgcttccattcattcgtttgattcaggtcaaaatggattcagggacgtttacagcatcgaaaacatcattgtgatcctcctatgttgtagtatagtgccgccattattttttattattggctgcagctcaagaaggaaattagtttcagactatagattaatgaggttgcttatgaataaagaacaccgagcggctttgctgcaaggattcatatgggacgttgatttaaggtggttccggatgttttgtctgatcttaggggctgccgaaacagtgattgtgatggccggtattgctattggatttggtgtgggtataacacgtgaataagaaactgtatcattcatcaaataggataaaaaataaaaaactgttctgtctcgttaaagtcatatatataaataggggattttcattaatttatatatatagatatacttgtgtacatgtacccgtaagtatcaaaagaaacgtgcataagga

SEQ ID NO: 2217 - DNA, 750 bp, Saccharomyces cerevisiae
cgcttatcacttactacttcacgatatacagaagtaaaaacatataaaaagatgtctgtttgtttagccatcacaaaaggtatcgcagtttcttctataggcctctactctggtcttttggcttccgcttcattgattacatctactactccactagaggttttaacaggatcccttactcccactttaaccactttgaaaaatgcggccaccgccttgggagcgtttgcgtcaactttcttttgtgtgagctttttcggcgctcctccctcattgagacacccctacttactctatggtatgcttgtagctccattatcttcatttgttctaggatgtgcctccaactatcagtctagaaagtacagtaaagtctctaaggaatcttctttatttcccgaagacagcaaactcgctgcttccgaactgagcgattctattattgatttaggtgaagacaaccatgcttcagaaaatacacctcgagacgggaagcctgcagcaaccacagtatcaaagccggcagaggcattgcacaccggtcccccaatccatactaaaaatctaattgcagcaactgctattgctattgttggctttgtacaagccgttattggcgtttatggggaaggacaatttatctagtgtttctcgttcacgtatttatctctacaagaatttgtagctgcctgaactcggctcctctctctctccaaaaataaagtgtgtagtaatttgcagtttttttat

SEQ ID NO: 2218 - DNA, 1643 bp, Saccharomyces cerevisiae
agcttttccagtaagttgctacaactaaagtgaaataaactatccgaattatataaaagatgcctgactatgacaattacactacgccattgtcttctagatatgcctccaaggaaatgtcagcaacgttttctttgagaaacagattttccacatggagaaaactatggttaaatttggctattgctgagaaggaattgggcttaactgttgttacagatgaagcaattgagcaaatgcgcaaacacgtcgaaatcactgatgatgaaatcgcaaaagcttctgctcaagaagccattgtaagacatgatgttatggcacatgttcatacatttggtgaaacttgtccggctgctgcgggtatcattcacttaggtgctacttcctgtttcgttacagacaatgctgatctaatctttattagggacgcctacgatattattattccaaaacttgttaacgtcatcaacagattggctaagtttgctatggaatacaaggatttgcctgtattgggttggactcactttcaaccagcacaattaacgaccttgggtaagagagctactttatggatacaagagctattgtgggatttgagaaactttgaaagagctagaaacgatatcggtctacgtggtgttaagggtactactggtactcaggcatcattcttggccttattccatggtaatcatgataaagttgaagcccttgacgaaagagtaactgaattattaggtttcgataaggtatatccagtcactggtcaaacctactcaagaaaaattgacattgacgtgttggctcctttgtcttcttttgctgctactgcacacaaaatggctactgacataagattattagccaacctgaaggaagttgaggaaccttttgagaaatcacaaatcggatcctctgctatggcttacaagagaaacccaatgcgttgtgagagagtgtgctccttggctagacacttaggttccttgtttagtgacgccgttcaaactgcatccgttcaatggttcgaaagaactctggatgattctgctattagaagaatttctttaccaagtgcatttttaaccgcagatattctattatctactttgttgaacatctcatccggtttagttgtgtatccaaaggttatcgaaaggagaattaagggtgaactaccttttatggctactgaaaatatcatcatggctatggtagaaaagaatgcctccagacaagaagtacatgagcgtattagagtgctctctcatcaagccgcagcagtagtcaaggaagaaggtggggaaaatgatttaattgaacgagtaaagagggatgaatttttcaagcctatctgggaagaattagattctttactggaaccatccacttttgttggtagagctccacaacaagttgagaaatttgttcaaaaagacgttaacaatgctttacaacctttccaaaagtacctaaacgatgaacaagtcaagttaaatgtttagaagcctttacatgtacaaataatatgtttattaccctattatatgttactaatgaaaaaaataacaattctttatttatgtacaatgcaagtagaattccctaaatagaagttaactatttttattttactggga

SEQ ID NO: 2219 - DNA, 460 bp, Saccharomyces cerevisiae
ttattacttgcaccttttgtaaagataactagtattcataaagtccataagctacaatatgcctcaaaaaccacttaaagttactaagaaagccaaggacccccgtagggtcacaaagaaacaaaaaaatttgagaaaagctgccccattgcaattgaaatcaaaaaagaaatctttgcaacatctgaagaaattgaaaaagagctcttcccttaccgaaaccactgaaagattagttgcgagtaaagtcgggcatttggagttgttgagaggtactagaaaggagttggaaaaaggtaagaagaactctaaatgatttcaagtgaataagattcgcccatcattgaaaggtatttattttcgggtaaggactatctaggtacatctcatcaaattttttatagtccaatttgatcctagtgtttgtatattagctttgtaacttctaagttatccaata

SEQ ID NO: 2220 - DNA, 1017 bp, Saccharomyces cerevisiae
gtatgtggacgaggtgtggtaagatctccgctgaggttgattgaaaagtattgggtaaatttgtactttttgtctgctgctggtcgtttgtctttcgttttaaaattgcgctagacaagtaaacagggattgcttaagaatcaaagtagcttaactctaaagtattattttcctcagttgtgggcccatgtgttggagggaaggaatatattgaaatgtaaatgttcttaagttcggttgaacttggatattgttacaagagttctagtctttgataccatttttacgcaattacaaccgcattatttaccttttcatcttcagttttacggttcagtttattctgttacgaaagaactatggtgattcaaaggcgaagtgcgtaggattgtaactcctatatctttaggatacttacaattttgtactgttttcaagaccactgtaaccgataataaaccggaggacacattttaacccactatttttttcagaagatcagatgcgagagctcgaagcataagtataatactaacgtttcaaaacatagtaattaggtaaaaaatgactcgctcttccgttttagctgatgctttgaatgccattaataacgccgaaaagaccggtaaacgtcaggttctattgagaccttcttccaaggttatcatcaagtttttacaagttatgcaaaagcatggttacattggcgaattcgaatacattgacgaccacagatctggtaagattgtcgtccaactgaacggtagattgaacaaatgtggtgttatttccccaagatttaacgttaagattggtgacattgaaaaatggaccgccaacttattgccagccagacaattcggttacgttattttgactacttctgcgggtattatggaccatgaggaagctagaagaaagcacgtttccggtaaaatcttgggttttgtctattaagtaagtttttagtagtggtacatatataatattaattcttatatccgtcttttctctttg

SEQ ID NO: 2221 - DNA, 1285 bp, Saccharomyces cerevisiae
ttttccgcatatctggtgtctttttatttggtcattgattggtttttgacagctcttcactcgcttcaagcttacttctagtttatttattcggcttttttccgtttgtttacgaaacataaacagtcatgaacactaccacatctactgttatagcagcagttgccgaccagttccagtctttgaactcttcttcttcatgtttcttgaaggttcatgttccttccattgagaacccattcggtattgaattatggccaattttctccaaagtgtttgaatactttagtggctatccagctgagcaattcgagtttattcacaataagactttcttggctaacgggtatcatgctgttagtattattatcgtttattacattattatctttggtggccaagctatcttacgcgccttgaacgcctctccattaaagtttaaattgcttttcgagatacacaacttgtttttgacttctatttctctagttttatggttgctgatgttagaacagttggttcctatggtttatcacaacggtctattctggtctatctgctctaaggaagccttcgcaccaaaattagttactctttactatttgaactatttgaccaaattcgtagaattgattgacactgtgtttttagttttgagaagaaagaagttattgtttttgcacacttaccatcacggtgccaccgctttgttgtgctacactcaattaattggtcgtacttctgttgaatgggtagttatcctactaaacttgggtgttcacgttatcatgtactggtactacttcttgagttcatgtggtattagagtttggtggaagcaatgggtcactagattccaaattattcaatttttgattgacttggtatttgtttactttgctacctatacattctatgctcacaaatacttggacggtattttaccaaacaagggtacttgttatggtactcaggctgctgctgcttatgggtatttgattctaacatcttatttgcttttgtttatttccttctacatccaatcttacaagaaaggtggtaaaaagacagtcaagaaggaatctgaagtttccggctccgttgcatccggttcttctactggtgtcaagacctctaacaccaaggtctcttccaggaaagcttaaataggaagcgagaatttttgacagcgaatgaaaaagaaaaaaattaaatgttaacattttctttatattaaatatgtacgataaatgaaatcattattatagaaatgatagattattgg

SEQ ID NO: 2222 - DNA, 1124 bp, Saccharomyces cerevisiae
atgagtaatgcaaacaatagtgctatgaaccacatcacgttgcctcccatctcgtcatttgacaaccttatcaaggcagccgagagacaatataatggcgaggcttcgtccgcctcgacacatccgacactgcctaatatgaacattagtaacggcagtggcagtgcgggcgcatcatcgtcgatgctgagctatcagttgcttccgcactccaatgatgtgtcccggtcgaactccagctcgagcttccttccctccgtgcagcagcctacggaaggttccgcttctgcatcggaaacttcttcatctgcatcaccttcacgttccatttcaccaattttaaaagtggctggtccttcatctgttggcggtgccggggtgagtaccccccatagcaccaaaatcaataagccaaggaaaaagaagcaatgtccaatttgtcgtaatttttatgccaatctgaccacgcacaaggcaacgcacttgacgccagaggatcggcctcacaagtgtcccatctgccaccgcgggttcgccaggaacaatgacttattgaggcataagaaaagacattggaaggatgagatactgtcccaatcgggagtactttcgaaccataatgatggtaagggaggatccgtttctcccaatgatgatgatacccatgaaaaaatgacaccgatgaattctgtcacagattatgcacaattgaaatcgttgcatcaaatcaagggcacattcaagtgcccattcaactccaccttaatacaattggacatggatatgtacccgtataaactgaaacctttaaattttgagacttccaattgtcaccagacgggggtgttctcacgttgcgacaccttcaaaaaccatttaaaggctttgcattttgaatacccgccaggcacgaagaaaaaggatagaaatgttgttcctggtagatgtaagcattgcggcctgaagttcgagaacgttgacgtttggctcaacgaacacgtaggtaaacaatgcggctataaataccattgattcccggcagcataacgacttttcccctgtttttattagtactagtagatatttaatttatgtatctgagtttttaatgttttttttccttc

SEQ ID NO: 2223 - DNA, 1440 bp, Saccharomyces cerevisiae
acatacaaatatacggatacgtacgcacacagaagcataaaagcacaaaagcacataagaagaccacatataaactagattatgtcctttgatagacagttgaccgaagaccaggaggtcgtccttaagcaaatttggacacaccttttccatctgtggcaagttcccgtggatggaactcatattttccctaataactccctccactcctcgtccacccctgctaagaagaagaaatcatcctggtttagcaagcttcagtcctcagaccatacacaggactccagcgaagccgctgaagcggcacacctctatgaaaagggcaagatacacaaggcactagccaatctagacccgcaaacgaccaagaagcagttctggcacgatatcaagaatgaaactccagacgccaccattttgaagtttatcagagccagaaagtggaacgcagacaagaccatcgccatgttgggtcacgatttgtactggcgcaaggacactattaacaagatcataaacggtggcgaaagagctgtgtatgagaataacgagaccggtgtcattaagaacctggaattgcaaaaggccaccatccagggttacgacaatgacatgaggccagtcatccttgtgagacctagattacatcattcttccgaccaaactgaacaggagctggaaaaattctccctgttggtcatcgagcaatcaaagcttttcttcaaagaaaactaccccgcatccaccaccatcttgttcgatctgaacgggttctccatgtccaatatggactatgcccccgtcaagtttctaatcacttgttttgaggctcactacccggaatctttgggccatctacttatccataaggccccttggatctttaacccgatttggaacatcatcaagaattggctggatccggtcgtcgcgtccaagattgttttcactaagaatatcgacgaattgcacaagtttatccaaccccaatacatccctaggtatctgggcggagaaaatgacaatgatttggatcattacactccaccagatggctctttggacgtccatctgaaagacaccgagactcgcgctatgatcgaaaaggagagagaagaattggtcgaacaattcttgactgtcactgcccaatggattgaacaccagccattgaacgatccagcatacattcaactgcaggagaaaagagtacaactttccaccgctctttgtgaaaactactccaagttagatccgtacatcagatcaagatccgtttatgactacaatggttctctaaaagtttgagccaagccacgcgacgctccatactgtatagacctttattataaaaacatctatttctttatatgtccctctatcttatttttcttttacttttatttgtataatacgcgaaaaattatagaatcatttatt

SEQ ID NO: 2224 - DNA, 740 bp, Saccharomyces cerevisiae
ggtatgtaccaagttctattcgaatttaaaggttatgaggtacaggaaggctgaaaaatgaaaacttcgagatgaaataatccacgtcgaaagtaatgctgaaaacacaagtagctctggattcaaatcataaggacgtacagaagtgttgctgacaaatcgcttctttttgatattagaatttcattcaatgaacaacggattgaagaattgtcgtgtcgacaggattgtacattttaccaggactgaggaatgaattcaacggctttgccgaacaaatcacggcataacctgcagaataacataacaacatagcgcttattatcattgcgtatgctggctgaaacgaacctttcactgaatcagctcatatcgcatggacggaataacaggtataaaaaatccacgagttatcaacctcattctctttaaaattggaatccaatcaaccgaattcatttgtactaacaacgtttcctattattgcagataaaatggctcacgaaaacgtctggttctctcacccaagaagatacggtaaaggctcccgtcaatgtcgtgtttgttcttcccacaccggtttgatcagaaagtacggcttaaacatctgtcgtcaatgtttcagagaaaaagctaacgacattggtttcaacaaattcagataagccatcataaataaacaatgacgaatatataaatactatatgtatacatatatcaaactgcctttgtacttttta

SEQ ID NO: 2225 - DNA, 615 bp, Saccharomyces cerevisiae
gaaagcccaaagggtgttaaatagtacagcgaacccttcagcaacggtacatcaacaaccccttgaaaagaatagagacaatacagctacagtcatccccttctcttgtatttttggccacaattgattgtattacatcatattttgcctgtgcgcttcttctatcttttccgcataaactaggggaaacgcgatgaagaaatggattggctgaaaaatacaacaattgtagtgttattcagtcattcaactgacaaaagtaacaaacacaagaaacgtcaagtccagtgcaatatgcgaaagaacactttagatatggtcactataggtatcgcatgccttgtgggagtctacacgggcacgagatttttcgagcccattgttatcgatagattgcgtaaggatggaaacttgagaacggacattcccatcccagaatacgacgaggacggaaatctgttaaaggtcacgccgtctttatcatccacaccagctgcaccacctacaccacctacacctcctactccaccacaacagtaaggaagcgtactagaaaatacctctatactttcttttcctgtatatagcatcaatagtaaagccattataacgtta

SEQ ID NO: 2226 - DNA, 978 bp, Saccharomyces cerevisiae
agcactactacactcgttcaacactcgttatatattatcatgcgtgccaccactttattatcttcagtcgtttctttggcattgttgtcgaaggaagtcttagcaacacctccagcttgtttattggcctgtgttgcgcaagtcggcaaatcctcttccacatgtgactctttgaatcaagtcacctgttactgtgaacacgaaaactccgccgtcaagaaatgtctagactccatctgcccaaacaatgacgctgatgctgcttattctgctttcaagagttcttgttccgaacaaaatgcttcattgggcgattccagcagcagtgcctcctcatccgcttcttcatccagcaaggcctcttcttctaccaaggcttcttccagtagcgcttcctcctctaccaaggcttcttccagtagcgcttcctcctctactaaagcttcttccagcagcgctgccccatcttctagcaaggcttcttccaccgaatcctcttcttcctcttcttcttccaccaaggctccttccagtgaagaatcctcttccacttatgtctcttcgagcaagcaagcttcctccactagcgaggctcactcttccagtgctgcctcttcgaccgtgtcccaagaaacagtctcctctgctctaccaacttctaccgccgttatttctactttctctgaaggttctggtaatgttctagaggcaggaaaatccgttttcattgctgctgttgccgctatgttaatctaattatctatcactttatttctaatgggttaaggtatctatcttttatatttcttatttcctcttcttatatgatgcggatgattttatttcttcaaaaaacattttaaaactcctctttatttcgttatgttccagttcactacgacttcttttctcttaaagagcaaataaaagtatataaatctatattaaatgaaaatcaaaaaaatattttttcgatca

SEQ ID NO: 2227 - DNA, 2437 bp, Saccharomyces cerevisiae
tggtggttttctgtttttctaatattgatcgattttacggtgagttaaactacttccttttatcgcaatatcatatttagagcgagaaagcaagaagaataaagctaggagaaaaaagcgccacgatacattcatactaagtttataatataccggtcgtcttttggctttctgataccatattatatcctcgaaacactttctctggattcacctactattaatcacctcaagatttcacttgtaaggcgttttcaaatttattgttattaaaagacatattcatattcagtatttttatttttcttcgaaacaggaaaagcttatctgagtatggattttacaacaatgactatggcaagcaatatggctactagtactactacgacggctacatcggcacatgcatctataaattcgtcatcaaactttaatattgatattgattcgaaccagaatactccttccattttgataaataacaattcggattcttctaatggaaaaaacacagattttaacggcgtcaataatattcaccaaaaaaatatcatgaataatacaaataatgttcatttgtactctccaaatataatggaccaaacgctactaactccacaggacattgccaagttacggagagaatcaatagcccattctcaagggatgggtggtgtttcatggggatccattagtgttggttcttggttaagagatgaaattattagccgtagaaatagtattgtacctgcatcagcaaacggtgctgcctccgctgccgcttctgcaaccactactgccactaatactttgcagattcaacaaccaactaagagaccctctgttagtaatccgccttaccatagagggtattctatttctcctcagatagcctacactgcttatctgccaaatctagaaaagcaatattgtaaagattattcatgctgtggtctttccttaccaggtttgcatgatttgctgagacattacgaagaagctcatatatccacgtctcctaacactaccaatatgtcacaaataccgatgaactctgctggtaacactagttcatcagttcgtatgacaaataatacctcttctgccaactataacctgcagaataacatggccgctaatacaaaaaatgcaggtcataagactaatactatgcaggctcatagcagcaatgcaactaataacacctccattaataatatgcatgccaatcttcagagcaacatggattccaactccacaatacgacaatctcagcatcctcaccatcagcagaatataatacaacaacagttgcaatcgaattctgtaaatcatacatcaggggctgtacccacaccgagtgtaatgggttcagcaactgcgtcgtccacaactgcaaatccaaatgtgatatctataacgggtgcccccaactcgggcttatctatggctaatcactctcaacaactacatctgaatggtaatctagtcgatgccgtttcaacgaatgatgtgtttttaagaacgagcaattctccatcaagacacgttccgcacaataaacaaattaacagtaacaataatagtggtatcaatatcaataataatacctcacacaattctaatattaacatgggtagtaaaaacgccatggtgaatcgtccacatacttttaataactattccttgaacaaaacgtccaggaatcctattcaacatcaatcaagaaaaattgatcctcatcaaaccgatttatcacctctggtacttgtccaagatatagatttaagttttatggatgatgatattttgggccctagtaaccacaattccatgaactctgtcgtaaatccaactacaggttctcacaactacaatacttttcattcttccgtacacgcaaaatcttctcaaaacatggtcgaggatcaagacattgatgacattgatgatgacgatgatgttgatgatgacgatgacgatgacgatgacgatgacacagaaaatggctccagttccaatggaaaatcagttcataacaacaattacaagatgcctcagcaagcttatatagacgatcctgcgagaaggctctatgtaatggatcatgaggaacaaaaaccctttaagtgtccagttattggttgtgaaaagacttataaaaaccaaaacggtttgaagtaccataggttgcacggacatcagaatcaaaaattacatgaaaaccctgacggtacatttagcgtaatagatccagattcgacagattcttttggtgatggaatgggctctgcaaaggataaaccataccgttgtgaagtttgtggtaagagatataagaacttgaacggtttaaaatatcacaggggccactccactcactaagatataattgtttctttactgaattgatttagtatgctatttagatactaat

SEQ ID NO: 2228 - DNA, 1002 bp, Saccharomyces cerevisiae
caaggtttcaagaaaataagataaagtgaataggaaggatgaaaatcaatgtatcccgtccattacagtttttacaatggagttcatatattgttgttgcatttctgatacaattgctaatcattcttcctttatcgatcttaatatatcacgatttttacctaagactattacctgccgattcctctaacgtagtcccccttaatacgttcaacattttaaatggcgtacaatttggtacaaaattcttccaatctattaaaagcattccggtaggtacagatctgccgcaaacaatagacaatggcttatcacagttaatccccatgcgtgacaacatggaatacaagctcgatctaaacctacagctttattgccagagcaaaactgaccatttaaatttagacaatttgttaattgatgtttacagaggtccaggcccgctattgggtgctcctggaggaagtaacagcaaagatgaaaaaatctttcacacttctagacctattgtctgcctcgcactgacggattccatgtcgcctcaggagatcgaacaactaggcccatcacgtctagacgtttacgatgaagaatggctaaatacaataagaatagaggacaaaatatcgttagagtcttcatatgaaacaatctcggtgttcttgaaaacggagattgcccaaagaaatctaataatacatccagaaagtgggattaagtttaggatgaattttgagcagggattaagaaacttgatgcttcgaaaaagatttttatcttatattattggcatttcaattttccattgcataatatgtgtacttttttttatcacaggttgcactgcattcatttttgttagaaagggtcaggaaaaatccaagaaacatagctgatagaattgtacttctcgctatataattttaaaacctagctgttattttctaagtaagtaggctcttccagcattctgcttcttcgccctgaataaaaaaaagatga

SEQ ID NO: 2229 - DNA, 1253 bp, Saccharomyces cerevisiae
atgcacacaatgcatattccatccggtgatgttctgataccgaagccgaagcttattactgaagaaacagatccactgcatataataaagacgaggcaaaagacacatggtcggcccgtgaccattgcaggcccaatggttcggtattccaagttaccattccgtcagttgtgccgagaatataacgttgatatagtttactcccccatgattttggcaagagaatatgtccgtaatgagcatgcaagaatctcagacctttctacaaataatgaggacaccccgctaatcgtccaagtaggtgtaaataacgtggctgatttactaaaatttgtggaaatggttgccccatactgtgatggtattggtattaactgtggttgtcctataaaggaacaaatccgagagggcataggttgcgctctgatatacaattcagatttgttatgcagtatggtccatgctgtgaaagataagtatggcgacaaactaagaattgaaacgaaaataagaatacatgaggcattggacgagacggtggagttatgtagaaagctatgtgatgctggggtagattggattacgattcatggccgaacacgtagaactaggtcatcgcagccggctaacctggatgcgataaaatatatcatcgagaacatcagcgacaaaaatgtgcctgtaatagcgaatggggattgttttaagttatccgatttggaaagaatcaccaaatacactggtgcacatggtgtcatggctgtgcgtgggttgttaagcaatccagcgttatttgctggatatactacctgcccttggggctgcattgagaagttttgttattgggctctagagtttggtggcttgccttttcaattggctcagcaccatctgtactgtatgcttgaaaatatggagttgaagaaatctctgttaaagaaaatgatgaatcttaaaaattacattagtctgatcgactggtttaataaaacctttgagttcaagcgttacggcgaggatggatttggcatgggcgttgaaattccttataaagctaatagctgtgtgcagaggagcgcctcagtggttgagagacaagaatgaataaattttgaattacaaaaatctaataaactgtggtactgaaattgtatatattttcctatcattcaagagcgtatactcgtaccccgaaagcagctctgtttgtgtaataatataacctaaaagaaataaaatgcttataagatgga

SEQ ID NO: 2230 - DNA, 1151 bp, Saccharomyces cerevisiae
catcggagttattatttttttctgcttattctttggtcgcaaaaaagtgtgttgtataattctttggaatatttataaaaacagggaatactctaacaacaaacgctagtgcttagctactcttccgctggtacttcaatatagcttgtcacatatttttgtccattaaggtcgttaaaacccgaataattttgtacgatcagtttagtaaaagaaatacagtattcaaaagctaacggtttattatgactgtttctacttccaagaccccaaaaaagaatattaagtataccttaacacatactttacaaaaatggaaagaaactttaaagaaaattacccacgaaacgttgagtagtatcgatgactctagtggaagcgatgaaaaaatagaggctctgtttactgtgtctcagcctgccgtcgtagcctccaagggtatagacagagatagtggtgcttctatgtcgcaggtaggaggaggtgtcaatagtacattggagatgaagctcacagatgagagtgaggaatctagctctgctaataacacgaccacaaccgcctcgcatactctatcgaattcgaagaagtctacgcagaactttgaaaactataacgtagtggaggaacgcataaaattagcacagaaaagtaaggcgccgttttgtaacgctgagaaaatctggaaacgaagaagacaactctggacacaacccactgagcaaagtgaaagcgccaataatgacggagttactcgaagggagattttccaagctatacctcaggaatattatgctcgagtttacaagaaactggtggtagatgataagccattgagagagcctctaaatctggaagatgctttacaagtcataaatgcaggctggacggaaacgagaaagtgggctaatgctgccaaggcatgccatgactgagtgtcgacgtcctttttgttttgccttatagcatcttttcctttcttcaaatttgcattacacaactttaactcagttaaagaacttcgtcatttacttattcttcttttttttcttacccttctttctcaaatcttatttctgtataaaatacgtattgattcattccattaataataacatataataatagtactaatttaaaaacattgaata

SEQ ID NO: 2231 - DNA, 3567 bp, Saccharomyces cerevisiae
caaattcaaaagcatctcgtagcatattaatatattgcagaaggtcatgagtgggataaagaaggaaccgattgaatctgatgaggttcctcaacaagagacaaaaaataacttacctagtgcaccttctgagatgtcaccccttttcctaaacaaaaacacacagaaggctatgcaatctattgcaccaatattggagggtttcagtcctaagacgtcagctagcgaaaatatgtctttgaaattgccacctcccggtattcaagatgatcacagtgaagagaatctcaccgtgcatgatactctgcaaagaaccataagcactgcactaggaaacggaaacaacaccaatacagttacaacttccggtttaaaaaaggcagacagtgaatcaaagtcagaagctgatcctgaggggctcagcaattctaacatagtcaatgatgcagataacataaattccatctccaagaccggatcgccccatttacctcaaggaacaatggacgctgagcagactaacatgggaactaactctgtacctacttcatcagcttcttcacgcaaatcctcgactagtcatcccaaacctaggctacccaaggtagggaagattggggtatgtgcaatggatgcaaaagtcctttcaaagccaatgagacacattttgaatcgtttaattgaacatggtgaatttgaaactgtcatttttggagataaggtgattctagatgaaagaatagagaattggccaacttgcgactttttgatatctttcttttcttcaggatttcccctagataaagcaattaaatacgtcaagttacgcaagcctttcattatcaatgatttaataatgcaaaagattttgtgggacaggagattatgtctacaagtattagaagcctacaacgttccaacacctcctagactggaaatcagtagagatggtggtccccgtgccaacgaagaattaagggcaaaattacgtgagcatggcgtagaagttaaacccgttgaagaaccggaatggaaaatggttgatgatgatactttagaagttgatgggaaaaccatgactaagccctttgttgaaaagcccgttgatggtgaagaccacaacatttatatatactatcattctaagaacggaggaggcggtcgtcgtctattccgtaaagttggtaacaagtcttctgagtttgatcctactttggttcatcctcgtacggaggggtcttacatttatgagcagtttatggataccgataatttcgaagatgtgaaggcttatacgattggtgagaacttttgtcacgctgaaactaggaaatcacctgtggttgatggtatagttagaagaaatactcatggtaaagaagttagatatattactgagttatcagacgaagagaaaaccattgctgggaaagtttccaaagctttttcacaaatgatctgtggtttcgatttgcttcgcgtttctggtaaaagttacgtcattgatgttaacggattttcttttgtaaaggataacaaagcttactatgattcatgcgccaatatattgagaagtaccttcattgaagccaaaaagaagatggatatggaaaagaagaatctgcccattattcgtgaagaaaaggaacaaaagtgggtattcaaaggactggctatcattatccgtcacgcggacagaacaccaaaacagaaattcaaacattcattcacttcgcctatttttatatcgttactaaaaggtcacaaagaagaagttgtcattcggaatgtaaatgatttaaagattgttcttcaggccttaagaattgcgttagatgaaaaagcaggaaatccagctaaaattaaagtgttagcaaacgctctagaaaagaaactgaattttcccggtacgaaaatacaattgaaaccggttttaaataaagagaacgaagtggaaaaagttcagtttattttgaaatggggtggtgaacccactcattctgccaaatatcaggctacggaactcggagagcaaatgagacaagattttgacctattgaataagagcattctacaaaacatcaagatattttcatcgtctgagagacgtgttcttcatacggcgcagtactggaccagagctctttttggggccgatgaattaggtagcgatgaaatcagtattagaaaggatcttttagatgacagtaatgccgccaaagatttaatggataaggtgaaaaagaagttgaagccacttttaagagagggtaaggaagctcccccacaatttgcctggccttcaaagatgccggagccatatttagtcataaagcgagtggttgaattgatgaattaccataaaaaaattatggataacaactttgctaaaaaggatgtcaactcgatgcaaacaagatggtgtacttctgaagatcctagtttgtttaaggaaaggtgggataaacttttcaaagaattcaataatgctgaaaaagtcgatccttctaaaatttctgaattgtatgatactatgaagtatgatgctcttcacaacaggcagttcctagagaacatatttgacccgggtcttccaaatgaagctatcgccgatgaactcggcagtcattctttagttgaccgatacccaattaacgttctcgccaaaaataattttaagataatagacagtcatagcatgaacaattctggaaagaacagtagtaatagtgttgggtcgttaggatgggttctggaaagcggaaaaacatctacagcaagaaaccccaaatcttcttctcaattcgatgagccacgctttatgcagttgcgggagctgtataagctggccaaagtattgtttgattttatctgccccaaagaatatggtatttcagatgcagagaaactggatatcggtttgttaacttcgttgcctttggcaaagcaaatactaaatgatataggagacatgaaaaatagagaaactccagcttgtgttgcgtacttcaccaaagagtcccatatttacactctattgaatatcatatacgaatctggtattccaatgagaatcgctagaaatgctttaccagaactagactacttgtcgcagatcacttttgaactttatgagagtacggatgcttctggtcaaaaatcgcattccattagactaaaaatgtctcctgggtgtcatactcaagatccgttagatgttcaattagatgacaggcattatattagttgtattccaaagatttccctgacgaagcatttggatatggactatgttcaacagaaattgagaaacaaatttaccagggtcattatgcctccgaaatttacaccagtaaacattacgagccccaacttgagtttccagaaacgcaaaaccagaagaaagtcggtatctgttgagaagttgaaacgtcctgcctcgtccggatcttcatcatctacctccgttaacaagacattagattagtgatcacacccaatttttaatttagtaacccaaaactaaataagtatttactcaacttttttttaaaaaaaaaaaactta

SEQ ID NO: 2232 - DNA, 891 bp, Saccharomyces cerevisiae
gaccggtcttctgctgtatggattttaaagcaagtgggacaaagtttaagaaaactggcaagaaggtagtgcctgctaaagcgtttgaagaaattgttcagacaaatagagatgttctgaaaaaatcagcattcctctcagatttacttgaaaatttacaaccgcacctcaataacattaagaaaatacgatgtgttgcaattggaaatttcaaggaggattttcctgcgacgtaccaattcgctcttctcctagagattactgattatataaaaagtgaggatgaaagggatgtcgttgtttccctgtatgatccaatatttactaaagaagagatacagtacttgaaaagtttaggaagcaaatggctgatagaggaagaattttcagagaacgatgcaattgattatgaatcggtattatatttccttccccatgctcctttggatttaactgagaacatactatcgtcacagcgaccacacttatggctggcaaataatatgatatcacacaccgatagatacaccaaagcaaaactttgtgaaaactatcctaatttaagcaagctagttcattacttgcagactaacgctccgccagaagttaaaaaagcacatgatgtagatggttttgcaacattcattccaaagagaaaaagaaaaaacagaaacaactcctctaaactcaaggtcacaccatctgatatagactatgattcaatagcaccgaagtttaagtcctgccaaatactcaccgattttgatgaaggaaagtatttgaaggaaaaaccctggatcaattccttctctgacttgacgttacatgctatagagtactaacatatcattcactacatagtactttataactaaactgtaactttcaggg

SEQ ID NO: 2233 - DNA, 2225 bp, Saccharomyces cerevisiae
tgatacagtaaaataaaaattcagtaatacagtcaaattattgcgatgaattttaaaatactcctcccgatttgtgctttattgacacttacaacatttctgttgaccattattgcaactgcgggttctacctcaaattataagccaataacgaacatttatatcggtgatgctgatatatcaaaaatcaacgttacaaaagttatgccacaagttggcccaattttgactgtgttaggttctgctctaaccgctccaaatacaacggtggataccatcttcggcgctcttaaggcaatcgcttctaccgaagccttgtctcctttactgcacttgttgtctaatgctgctaacacttcagccacattatcatctttgacacagttggctccaatggctttgctaggaaccaataccgctactaccacgaccttctccgctcttgatgagttattgactacctctaaaaacacaaccgaactcttggatgggtttagcacattgatgtcatctatgtcaaccaacacttcttctacttcggcttccttagaaaatactgttctaaccctattagtggattcgaccaatcctataggcactactgagtctttgatcactttaaataatatgaccacagaagaaaagacaaaattgtcgcctgtattcgagttattcgcaagttccaagaacattactgccacatgcgatgcgttagaaaccataatgaactctaccattccaacttcaacggtctcctcattgttttctagtctaaaaaccagtcttgcggaaggtggcaatgctactgaaactattatgcaattaggctccctcgttccttcgagtttaaaaccagctgtccaagctgttgttactctgtttgatgaaactacatctcaaaatgtaacattatccgtattgagcactatgattgccgaaaacattacccaatcatcttccgctaaagctgccatgggtgctttgactgacttgttgaattacactacaaaccaaacagagctgctaacatctgtcgaaagtttggccctctctaaagaagccgcttcctctactaaccaattggtggcacttgatgaaatcctttctgcaagtgctaacgcatccacagttgtttccataatccctactttggaatcccaattggccaataacaccgtattacttaagtacgttccatacttgttcagcctattagctgcgtcaagcgaccccgtgtcaagtttctcttctctggttaatatcaccaaatgggcagaaactaatgccgctacatttatgcccatgttgaaaattttaaactctgctgtaaacatgacaactatcacaccagaacaactcaaggaaatgactccttctatccttgaatatctacacatccctgtcatataccgtttgtccattttcacaatgtgtcgtgctcacttaaacagaacaatgtactcgtgtagcaagtcacacgctgttcaaaacatggatttccggtcgattgtttacaacaacattgaaggctcggactttaaaccttatatggatgccctgaacatcggtaaggacgatttgcatttagatggtgaattacaagacagacaacacatgtatgtcccagcagtgaaagcagctttagctatgaacttaatgtgcataatcacatccttcttcttaatggtattcttgttgctactaagtagacgttccgtggtgagtcaaaaattatggttggcattgggctttatttcctgttggatatgtattttcagcgggttgggaagcacaatctttagcgtcatccttaatatgatgaaatccggctccaagaaggacaattacgatgtcattatttctggctcttctccattttatggcctaatgtggtctggatttgtatttgccgtccttgtatttctctgcattgcatactgctggtggagcagcagaaagggagctgccatcgtggaagctgagaaagctgttcaagaaagtgactctactacctcaagaatcattgaagaacacgaaagccccattgatgctgaaaaaaactttgcaaggtaaaataataaaaagaagatcatgcaacatcaccccgtaaattttttcaattctccatccttttaattttcttcattataattttctgaattgtatatagacaatatattttaatcatatttaatatgaaacggaacacaaaaattaattaataa

SEQ ID NO: 2234 - DNA, 1198 bp, Saccharomyces cerevisiae
cacttaagtaatacctaacaaagcaatggtacaagaaatcgatttaggtttgacatgtgatatgcatgttcatgtaagagagggtgcgatgtgtgaactagtcacccccaagattagagatggtggggtttcaattgcttacatcatgccaaatttacaacctccaattaccacactagatagagtgattgaatacaaaaagacactgcagaaactagctcctaaaactaccttcttaatgagtttttatctttcaaaagacttaactccagatttaattcatgaagctgcccaacaacatgccattcgtggagtaaagtgttatccagcgggagtaacaacaaattcggctgctggggtggatccaaatgacttcagcgcattttacccaattttcaaggctatgcaagaagagaacctggtattaaatttgcatggggaaaaaccttctgtccatgatggagacaaagaacctattcatgtattgaatgcagaggaagcctttttgccagccttgaaaaaattgcataatgatttcccaaacctgaaaataattctggaacactgcactagcgagtcggcaataaagacaatcgaggatataaataagaacgtgaagaaagccactgacgtaaaggttgctgccacattaacggctcatcacttatttttaacaattgatgattgggccggaaatccggtaaatttttgcaaacctgttgcgaaacttccaaatgacaaaaaggctctagtcaaagctgctgtatcagggaaaccatattttttctttggatctgattcagcacctcatcctgtacaaaataaggccaattacgagggtgtttgcgcaggagtttactcacaatcttttgcgatcccttatatcgcccaagtttttgaagagcaaaatgccttggagaacttaaagggctttgtttccgacttcggaatttccttttatgaggttaaagatagcgaagtggcttcttcagataaggcaatattattcaaaaaagaacaagttatccctcaggttatcagcgatggcaaagacataagcatcatcccatttaaagcaggtgataaactaagttggtcggtgagatgggaacctcgttaatatgcaacaatatgtaggctcatttgagagtatagaccatatatacatatttatgggaaaaataaacttaccttccaa

SEQ ID NO: 2235 - DNA, 1102 bp, Saccharomyces cerevisiae
ttaatatgtgataatacggctgtgaggaaaaggtgaagttctggtgatgaatatagactgtttgtgtcgttgggtagttctgccactgctgcgctatccacttctggtagctcttgtattgagatggtctctaagcgactcgataagcatttgtctaacaatctatacactactgataaatgcattcctcattgctaattcctatataaagcggtcgggacaggtcgcctggaagagccttcgtgaatttaagaatggcatagttcttattactggaggaagtaaaggacttggacgggccatagtatctcaactcctacaagactacagcaacctgaccatcttgaatgtcgacatatgcccatcatcagtgaggaatactcgcgtgaaggatctcatctgcgacctgagtgatgatgaagaagttgcagcactactgaatttgttgaaaagaaagtataaaaatgaaatccgattgattgtgaacaatgctggagtaagggccaacttcaccggattcaacggcatggaacgggataatcttgataagatttttaagataaacacatttgcaccacttcagttcattcaagaactggcccctagtagacactcaactagacagtgttatattgtcaatatcgcaagcattttgggcatattgacgccggccaaagtagcagcttatgcggcgagcaaagcagcattgatagcctttcatcagtcgtacagttttgaattgcaaaacgaaggcgtaagaaatatcagaacactattagtgaccccagggcaactgaatacggaaatgtttgcaggattcaagcctcctcgccagttctttgcccctgtaatagacattactactctagctgccaagatagtccgttattgtgagctgggtcagaggggacagctaaatgaacccttttattgtagttttgctcatcttttgatgtgcgtaccttattcgctacaacgcattgtaagaagcttctctcgcatagattgctgcctcccggacgagtagaaagctatacatagtaaatagaatatttatagatgaatccgagtagacagccttggtgtttgcttatacattctt

SEQ ID NO: 2236 - DNA, 2272 bp, Saccharomyces cerevisiae
taagctatatcgtaaacaccgttggatgtggaccacggtgcactgataaaataaagatatagtagtagaatctgttactaatcttaacacttttgatggtagaaccggacatgcagaagaaggcaagtggtggcagtggcggttccgagatggatactttaaatgctaccagcaacagtagtaaacaaggagtttcaaataataaaaggaatccggtcagtaaaaagaaaccagggaataaggtctctgatggaagagataatgcacataattatcacggggaaggccgcagaaaaagtagcaaacaacagaggtcaagaacgccctataaggagactagtactaggatcaatgatcaagatatagatttatctatccaggaagaaattcttggtggtaatttcaaattacgaggcaggaaaactcaagtttccattaatcatttgttgaatttccagttacctgaagtcgaaagggaaaaaagtaggtcctcttcaagtaagaaatcgaataggagacgcgatgagcacgtacatttacacggtgacacatttgttaatgttaattaccgtcttttggtagatgatcgttttgactacccagagcaaaactgtaacccgaacgttcctgtcgatcaagaaaagattctaagagtcatagtgccaaagggtcagaattgttctatttgtctgagcgaggaaccggtggctcccagaatggttacttgtggccatattttctgtctaagttgtctcttgaactttttctccattgaagaaaccgtcaaaaataaagagactgggtactcaaagaagaagaaatataaagaatgcccgctttgtggaagtattattggccctaaaagggtcaagcctgttctgtatgaggacgactttgatgtaaccaggttaaatcaaaaacccgaacctggtgccacagtacatctacaactgatgtgtaaaccacacggttcactattacctttgccagtagccttacatttagaccctctaaaatgtggaaatttccctcccgcaaacttaggatcaataaagcattatgcgcatattatgaagtgtggcgtgtcttactccttggagctctatcaaaaggacattgttgctattcaggaacaatatgaaatcgacaaggccatttataatgatagtggaaaatttgttaagcagtcgattgaaaatatcaatgatcaaatttcgacgttgctggctgcaaccactgatttgagcccactttccaacgatattaacaacggtttggacaattttcattttgatgacgatctcttgaccaaatacgatgattcttccgcttattttttctaccagacgttggtggcatcgtccacgaaatacttcttatctccactggatgtaaaaatcttattgactattttccactattattccaagtttccagaaagcatcgagacgacagtcgaaaatatacattatgatacagtggtaacggagcaattaatccgccgctacaagtacatcggccaccttccaatcggcactgagattgcccttttagacttggactggcgtaaaataccattccttcccaaggaaatttacgaacagtttgctcatgagctaaaacaacgtcgaagaaaattcacaatgaaaaagcaaaaggaagataaggaaaagaaactatatgaaaaaaggttggaacaagaacatgccgagttctacagaaaggaaaatggcaattctctcaagtttgaagactctgtacagatggctacccattatgaatccattgtaagctcttccatacctctcaactccttaggaatttctatgctgggtccaccgacaaattcctgctctactcctcaaaagcaagcgccctcccacacgaaaagaacaatttgggggacatcaattgcagtgacggaagacgaaaaagcatcaaaggagaacaaagaatttcaagatatgttattgcagcgaataaggcaggaagatagttcggatgtcacagattcgacggattctcctcctacaagtaatggtaagcgaggcaggaagaagaaaggtaaagtcatgctattcagcagcaatcatcaagccttgggttaggttacagcatgttctgcttaaaaatctctttccaagccagaaatgtgggaggacctattctatatcatttcaaaatcgaactctatatctttatgtataacttcaaacgctattgcatataaacaattactcatatatagtccaaatgcattcataccatgtta

SEQ ID NO: 2237 - DNA, 2040 bp, Saccharomyces cerevisiae
atgagtggaaaatttgttcgtgcttctaaatatagacacgtctttggccaagcggccaaaaaggaactgcaatatgaaaaactcaaagtgaccaacaacgcatgggactccaacttgctaaaaacgaatggtaaatttattgcggtgaattggaatgcctctggaggtggtgcattcgctgtcattccgatcgaggaagtgggcaaggctccagatcaagtgcctttgttcagaggccacactgcgcaggtcttggataccgattttgatccgtttaatgaccacaggattgcttccggttccgatgattctaagattggtatttgggacataccggaaaactacaaatttcacgatcatgtagatgaagatggagagccaattgatatcaaaccagtaaagtttttgacaggacacgcaaggaaagttggacatgttctttatcatcccgtcgctgagaatgtattagcatcctcttcaggtgactatactgttaaattatggaatgtggaaactggaaaggacatgattactttgaaacatccagatatggtcacatccatgtcattttcgtatgatggtaattatcttgccacagtggctcgagataagaaactacgagtctggaatatcagagaagaaaaaattgttagcgaagggcctgcccatacgggtgcaaaaaaccaaagggtggtatggttaggaaactctgacagattggctactactggtttttcaaaattgagtgatcgtcaaatcggtatttgggatgccttcaacattgaaaagggagatttgggaggcttctacactgtcgaccaatcatcaggtattttgatgcccttttatgacgaagggaataagattctttacttggtggggaaaggtgatggtaatattcgatactacgaatttcaaaacgacgagctgtttgagttgtctgaattccaatccacagaagcacagagaggctttgctgtagcgcctaagcgaatggtgaacgtcaaagaaaacgaagtcttaaaaggtttcaagactgtcgttgatcagcgtatcgaaccggtatctttctttgttccaaggagatcagaggagttccaagaagatatctacccggatgcaccttccaataagccagctttaactgctgaagagtggttttctggcaagtctgttgaaggtccaattctcgttagtatgagatctatctatgacggttccgcaccaagctttcatgaggctaaaagacctcaacagccaacaactcaagaaacagctcttgaagagaaaaaggagcagcctaaagtggagaagccaatcagcgaatccgaaaaggaggtgaaacaagaagctccaaaatctccctcaccgctaaagtcggcctcctcatcttctacaatcaaccatgtattaaaggaagataattcgatcaacaagttgttgaagaaatcctccgatattgatcaagttaacaacgccgaagatccgtctagggatacctccggatgggaagaagccgatgatgagccagctcctatcaaaatcgaaaccccagtcactccaacagaaactaaaaaggatcgcacacctaaggtcgaaccttcaaaagaattgaagccagagccagtgtctatcgcaacagatagaaaacaggagcaaagcttacctcaagaagagaagtcctctgagaaaacaaagtcccctgagcaggaaaaatccgcaacacctccttcttcaattacggctgctaagacagccattactgccagcagtaaggaagagccatccgcggcaaggacatcacctaagtcattgggtttaaaaaagtctgtcgaaaaactatctacattggttctgcaattagaagatgtagttgataaattaacgaaagcaaatcttgacaaagatgagcgcctgttaaagttggaacaaaaaattggcgaactgtcaaaatgaaaattttttgtacttttaatgataaaattaagtgagtcctttttataggaaagatgtattttgattatatgtaatgtacataag

SEQ ID NO: 2238 - DNA, 1745 bp, Saccharomyces cerevisiae
gaaaagcacgtcatctcatctgtctcacttttattctaaggaaaagaagtcatcgacaggttaacagcagtaaatattatcagtgcaattaataactccgaaagtagtaaaagcaatggccgccgttagagactacaagactgccttggaattcgccaagagcttaccaagactagatggtttgtctgtccaggagttgatggactccaagaccagaggtgggttgacttataacgactttttggttttgccaggtctggttgatttcccatcttctgaagttagcctacaaactaagttgacaaggaatatcactttgaacaccccattcgtttcctctccaatggacaccgtgacagaatcagaaatggccatcttcatggctttgttgggtggtatcggttttattcaccacaactgtaccccagaggaccaagctgacatggtcagaagagtcaagaactatgaaaatgggtttattaacaaccctatagtgatttccccaactactactgtgggtgaagctaagagtatgaaggaaagatttggattttccggtttccccgttacagaagatggtaaaagaaacggaaaattgatgggtatcgtcacttctcgtgatattcagttcgttgaagacaactctttgcttgttcaagatgttatgaccaaaaaccctgtcaccggtgcacaaggtattacattgtctgaaggtaatgaaattttaaagaagattaaaaagggtaagctattgattgttgacgacaatggtaacttagtttctatgctttccagaactgatttaatgaaaaatcagaactatccattggcttctaaatctgccaccaccaagcaactgttatgtggtgctgctatcggtactatcgatgctgataaggaaaggttaagactattagtcgaagcaggtttggatgttgttatcttagattcctctcaaggtaactctattttccaattgaacatgatcaaatggattaaagaaactttcccagatttggaaatcattgctggtaacgttgccaccagagaacaagctgctaacttgattgctgccggtgccgatggtttaagaattggtatgggttcaggctctatttgtatcactcaagaagttatggcctgtggtagaccacaaggtacagccgtctacaacgtgtgtgaatttgctaaccaattcggtattccatgtatggctgatggtggtgttcaaaacattggtcatattaccaaagctttggctcttggttcttctactgttatgatgggtggtatgttagctggtactactgaatctcctggtgaatatttctatcaagatggtaaaagattgaaggcatatcgtggtatgggttccattgacgccatgcaaaagactggtactaaaggtaatgcatctacctcccgttacttttccgaatcagacagtgttttggtcgcacaaggtgtctccggtgctgtcgttgacaaaggttctatcaagaaatttattccatatttgtacaacggtttacaacattcttgtcaagacattggttacaagtccctaactttattaaaggaaaatgtccaaagcggtaaagttagatttgaatttagaaccgcttctgctcaactagaaggtggtgttcataacttacattcttacgaaaagcgtttacataactaattggtaactagggttcattaataataaaataaaactaaaaaatatgtgtttatattta

SEQ ID NO: 2239 - DNA, 1385 bp, Saccharomyces cerevisiae
atgtccgaagctaccctctcctccaagcaaaccattgaatgggaaaacaaatactccgcccacaactaccaccccttgcccgtcgtttttcacaaggctaagggcgcacatgtgtgggacccggagggtaagctgtacctcgacttcctgagcgcttattctgccgtcaaccagggccattgccatcctcacatcatcaaggctttgacggagcaagcacaaacactaacattgtcctccagagcgttccacaacgatgtttacgcgcaattcgccaagttcgtgaccgaattcttcgggttcgaaaccgttttgcccatgaacaccggtgcagaagccgtggaaactgctttgaagttggccagaagatgggggtacatgaagaagaacatccctcaagataaagccatcattctgggtgccgagggtaacttccacgggagaaccttcggtgctatcagtttgagtaccgactacgaggactccaagttgcatttcgggcctttcgtgcctaacgttgccagtggtcactccgtgcacaagatcagatacggccacgcagaagatttcgtccctatcttggaatctcctgaaggtaagaacgttgccgccatcattctagagccaattcagggtgaagccggtatcgtcgtgccccccgcagactacttcccaaaggtctccgcattatgccgtaagcacaacgtcctattgatcgttgacgaaattcaaaccggtatcggtagaaccggtgagttgctttgctacgaccactacaaggcagaggccaagcctgatattgttttgttaggtaaggctctctcaggtggtgttcttcccgtctcatgtgttctgtcttctcacgacatcatgtcttgctttaccccaggatctcacggttctactttcggcggtaatcctttggcttcccgcgttgccatcgccgccctcgaggtcatccgcgacgagaagctgtgccaaagagccgcccaactgggtagctctttcatcgcccaattgaaagctctccaagccaaatctaacggtataatctctgaggtgcgtggtatgggactgcttaccgccatcgtaatcgacccatccaaggccaatggtaagaccgcttgggacttgtgtctattgatgaaggatcacggcctcttggctaagcccacccacgaccacatcatcagattggctcctcctttggtcatctccgaagaggacttgcaaaccggtgtcgaaaccattgccaagtgtatcgatctgttataatattaatacgcattttttttatgttttctcgtttcttttcttttttttgttttatatcttacacatttttaatatactaaaagtaaaataaaaaaatacgtactgtttcc

SEQ ID NO: 2240 - DNA, 1150 bp, Saccharomyces cerevisiae
ccattctatctctgcggctagaaaaaaataccataaaaatataataaaaatgtggaagagatcgttccactcccaaggagggcccctgcgtgccagaacaaagtttaccaaaccaaagccaaaacaaccggtgcttcccaaagacaaaataagaccgcccactcaattgactcatcactccaacaacctgaggattaccgaaccaatcccaccaacaacctcaaacctgcgctgtcccgacgaccacccgctgtggcagttcttctccaacaagaaattcatcaggtccgccgacgacttgccgccttccagccatatcagaccctggagcatcccagagttgaggcacaagtcctttaacgacttgcattccctttggtacaactgcctcagggagcaaaatgtgcttgctcgcgaaaaccatctcttgaaaaacattgttggctccacgcatgacgaattcagtgagctctctaactctatcagaaccaccatgtggcaaataagacatgtacttaacgaaagagagctggcctatagcgcttcacgcgaatttttacaggatgaatcggagaggaaaaagttcttggatactttggccaacgattacttcttgaacaaggatatccctgatgacgaagtcgcctccatgctcacacgattccagttggccattttcggcatatcggaaaccatccaggataatacagtcgacattaacttcatcgacgggatcaagttcttggcaaacttaaaactacagcggttcaaggactccaatgacctcatatccgaaatatcacaagaaccgatcacagacgtgggcgagtcgttcatcttattcacttccgacttcgaacctcatgccgttcaagaggcttgtgtcgccatcaaagacctgagaaagtccccagataataaagtccctaaattagacgaactccccaccgtgagaaaatacttgaaacagctaattcatgcaagctccgtggagcaagcaactgcatgattcccgtgggcttcctaccctctctcctgtaaatatatatatatatatatatccacacacactcgcacatacatacacacatacatacacctttatatagctatacgctgtatgtattcagaaattagtcacgttgtggaa

SEQ ID NO: 2241 - DNA, 1347 bp, Saccharomyces cerevisiae
atggtgatgtcaagaatacgagatacaatagccaggccattccagaaccttacagcccttgagaaagtggtacagtggctaagattagggacgacattactcataatctctttcgggttggcgttgactgtcggacccctttcttcgccaagaacattgtacatgtcacgactggatacttactctgctgatattacgacgggtttatttaccgtgttgagagagtctatggagcagtcgacatctacagaagaaaataacggtgtaggcttaacaacatccgaactgtatatattgactgcttacaccgaaagtcagataaagaatgttcctcagtacatcacagtgtcgctttatgggaggtgcgattcaacatataccatggtggaagtattcgactctgaaggaaatatgcatagcgtaaagaattcgactactaagagtacctgcagtagcataggaacggactatctttttgattatcgtgaggttttagaaagcttgggtttagatatcattttagattatgcatacaacaaaatcggttcacaacaggcagaaagttctgcatacacgacctacatgaggagtttaaaacataaaaaggccaacgtgttacatttactctatgcagttattagtttccaggtgtgtatgttatttttcatgatatggtactactacataaagggaaggtttatgaacgccctcaaagaaagggcacttgttcatatcaactctctactatcgctagttgttttcattgggggcctgataagtagcataagccttgcctgggttaactacactattcagtctagaattaatacagaattagaggccttcgggttttcttaccatcttggagttacatggtttgcgcttctgtggtgttttgcaggtttgatttctgtgtcatgcttagcttggtctggcttagaatggtgtatttccgataatggcacgtcctatggaggtggaatcgatgataaattcttaggctaccaagccggtgtatttactgatgcagatctagacgatgaaacttcttacagtcaacgttatccgcaacgacagtctacttcgggcgaggctgaactgatgagaaacagtgatactatggcaacaataagaaaaacatctgatgttgacttaaatagtgaaaatgatgctaacaccagtttagaccatggaaatcccaccgcaaatataagcaatggcggcaaacacgaaccatttgctactagagaggaattcgaattgcaggacataagattccggtcaagcaacgacagtgaagaaagtatgcaaagggttatcaagccttcgtcagcattacagttttga

SEQ ID NO: 2242 - DNA, 844 bp, Saccharomyces cerevisiae
caaaatctcatttaggtttgactactttcttgaacttggaagagaagcaaatatattcaacgaaatgactgcccaacaagccccaaagtggtatccttccgaagacgttgctgccccaaagaaaaccagaaaggctgttcgcccacaaaagttgcgtgcctctctagttccaggcactgttttgatcttgctagctggccgtttcagaggtaagagagttgtctacttgaaacatctagaagacaacactctattggtcactggtccattcaaggtcaatggtgttccattgagaagagtcaacgctcgttatgtcattgctacctctaccaaagtctccgtggaaggtgtcaacgttgaaaaattcaacgttgaatactttgccaaggaaaaattgaccaagaaggaaaagaaggaagctaacttgttcccagaacaacaaactaaggaaatcaagactgaacgtgttgaagatcaaaaggttgttgacaaggctttgttggctgaaatcaagaagaccccattgttgaagcaatatttgtccgcttctttctctttgaagaacggtgacaagccacacctattgaaattctaaattgaactgaaaaaattataaatgatttaaaatagaatttcaaaacaaggagaattgatagagaatgcgttgatctgaaaatactgtttgacaataacggaaaggtaagtggatatgtaatctaagtttaatcctcttctaattcatttttcctatcaacattatctgtgcttttctatatccttctttttgtatctataattttttttttctcttacatagcaaaatacaaaaaatcataaatattaa

SEQ ID NO: 2243 - DNA, 1296 bp, Saccharomyces cerevisiae
aaagacaacaaaatatacgtctctaccatgtctgatatgcttccattggctacgtatagcctgaatgttgaaccatactccccaaccccagctctgaacttcaaaattccggttaccattagaatcacaatggcggccatcgaccctgagccctttgacgatgacaaaaagccatctactttaagaataatcaaaaggaatcctgaactcactcgcggtgagtactacaaccaagataacaatgacggcctcgaagaggatgaaagtgaaagtgaacaagaagcagatgtaccaaaaaggagtgtcaaatcaaaaaaaggtaaggcagtcgagcaaagtgaatcagaagactctgaagatgaaaacgaaatcgacgatgaattcgaagaatgcgttcttttaaccttatctccaaaaggccaatatcaacaagctttggatattaccattgcaccagaggaagacgttcaattcgtcgttaccggttcatacactatctctctaaccggtaactacgtcaaacatccattcgacaattcttcagattcagacgaagatgaagaagactattacagtgacgaagaatcttccaatggagaagaagaagaagaagaagaagaagaggacgatgaggaactaagttccggtgatgacgatcttgatgatttagtagatgctagtgacatcgaaagtcgtcttgatgaattagtcaaaaaggacgaaaagaagaaaaacaacaagaaggacagtaaaaggaaacatgaggaagatgaggaagaaagtgctaaacctgccgagaaaaaacaaacgaccaagaaagacaagaaagcagagaaagttaaagactcggaagagagcaaaccaaagccaaagacgaagctactggaaggcggtattatcattgaagaccgcgtcacaggaaaaggcccacatgccaaaaagggtaccagagttggaatgagatatgttggtaagttgaagaacgggaaagtttttgacaagaatacaaagggtaagccttttgtttttaagttgggccaaggcgaagtaattaaaggatgggacatcggtgttgctggtatggcggtcggtggtgagcgtagaattgtcattcctgctccatatgcctacggtaaacaagctttgcccggtattcctgctaactctgaattgacatttgatgttaaattggtctccatgaaatagggtccttaatgcatacgtattgatatatgtatctataatactatatacaattatctatacttccattactaatattatctttcaatttta

SEQ ID NO: 2244 - DNA, 3375 bp, Saccharomyces cerevisiae
acacagatacatcttgaagaggtggagtaccaaagggaatattttgtacgagcaagttatagtaaggacacttcagtgagaaattaatctgacttacttttacttaattgtgttctttccaaattagttcaacaaggttcccacatacaacctcaaatgtcacttcccttaaaaacgatagtacatttggtaaagccctttgcttgcactgctaggtttagtgcgagatacccaatccacgtcattgttgttgctgttttattgagtgccgctgcttatctatccgtgacacaatcttaccttaacgaatggaagctggactctaatcagtattctacatacttaagcataaagccggatgagttgtttgaaaaatgcacacactactataggtctcctgtgtctgatacatggaagttactcagctctaaagaagccgccgatatttataccccttttcattattatttgtctaccataagttttcaaagtaaggacaattcaacgactttgccttcccttgatgacgttatttacagtgttgaccataccaggtacttattaagtgaagagccaaagataccaactgaactagtgtctgaaaacggaacgaaatggagattgagaaacaacagcaattttattttggacctgcataatatttaccgaaatatggtgaagcaattttctaacaaaacgagcgaatttgatcagttcgatttgtttatcatcctagctgcttaccttactcttttttatactctctgttgcctgtttaatgacatgaggaaaatcggatcaaagttttggttaagcttttctgctctttcaaactctgcatgcgcattatatttatcgctgtacacaactcacagtttattgaagaaaccggcttccttattaagtttggtcattggactaccatttatcgtagtaattattggctttaagcataaagttcgacttgcggcattctcgctacaaaaattccacagaattagtattgacaagaaaataacggtaagcaacattatttatgaggctatgtttcaagaaggtgcctacttaatccgcgactacttattttatattagctccttcattggatgtgctatttatgctagacatcttcccggattggtcaatttctgtattttgtctacatttatgctagttttcgacttgcttttgtctgctactttttattctgccattttatcaatgaagctggaaattaacatcattcacagatcaaccgtcatcagacagactttggaagaggacggagttgtcccaactacagcagatattatatataaggatgaaactgcctcagaaccacattttttgagatctaacgtggctatcattctgggaaaagcatcagttattggtcttttgcttctgatcaacctttatgttttcacagataagttaaatgctacaatactaaacacggtatattttgactctacaatttactcgttaccaaattttatcaattataaagatattggcaatctcagcaatcaagtgatcatttccgtgttgccaaagcaatattatactccgctgaaaaaataccatcagatcgaagattctgttctacttatcattgattccgttagcaatgctattcgggaccaatttatcagcaagttacttttttttgcatttgcagttagtatttccatcaatgtctacttactgaatgctgcaaaaattcacacaggatacatgaacttccaaccacaatcaaataagatcgatgatcttgttgttcagcaaaaatcggcaacgattgagttttcagaaactcgaagtatgcctgcttcttctggcctagaaactccagtgaccgcgaaagatataattatctctgaagaaatccagaataacgaatgcgtctatgctttgagttcccaggacgagcctatccgtcctttatcgaatttagtggaacttatggagaaagaacaattaaagaacatgaataatactgaggtttcgaatcttgtcgtcaacggtaaactgccattatattccttagagaaaaaattagaggacacaactcgtgcggttttagttaggagaaaggcactttcaactttggctgaatcgccaattttagtttccgaaaaattgcccttcagaaattatgattatgatcgcgtttttggagcttgctgtgaaaatgtcatcggctatatgccaataccagttggtgtaattggtccattaattattgatggaacatcttatcacataccaatggcaaccacggaaggttgtttagtggcttcagctatgcgtggttgcaaagccatcaatgctggtggtggtgcaacaactgttttaaccaaagatggtatgactagaggcccagtcgttcgtttccctactttaataagatctggtgcctgcaagatatggttagactcggaagagggacaaaattcaattaaaaaagcttttaattctacatcaaggtttgcacgtttgcaacatattcaaacctgtctagcaggcgatttgctttttatgagatttcggacaactaccggtgacgcaatgggtatgaacatgatatcgaaaggtgtcgaatactctttgaaacaaatggtagaagaatatggttgggaagatatggaagttgtctccgtatctggtaactattgtactgataagaaacctgccgcaatcaattggattgaaggtcgtggtaaaagtgtcgtagctgaagctactattcctggtgatgtcgtaaaaagtgttttaaagagcgatgtttccgctttagttgaattaaatatatccaagaacttggttggatccgcaatggctggatctgttggtggtttcaacgcgcacgcagctaatttggtcactgcacttttcttggcattaggccaagatcctgcgcagaacgtcgaaagttccaactgtataactttgatgaaggaagttgatggtgatttaaggatctctgtttccatgccatctattgaagttggtacgattggcgggggtactgttctggagcctcagggcgccatgcttgatcttctcggcgttcgtggtcctcaccccactgaacctggagcaaatgctaggcaattagctagaataatcgcgtgtgctgtcttggctggtgaactgtctctgtgctccgcacttgctgccggtcacctggtacaaagccatatgactcacaaccgtaaaacaaacaaagccaatgaactgccacaaccaagtaacaaagggcccccctgtaaaacctcagcattattataactcttgtagtttacatggtgatactttatatctttgtattgtctagctattctaaatcatctgcatgtaataagaagttga

SEQ ID NO: 2245 - DNA, 1263 bp, Saccharomyces cerevisiae
gaaaaactcaccaaaaggagaccaatggattccacagcacttaaggtagctctaggctgtattgcaattcgtttggctgtgaacagcctttttccctctctacaacaacaactggaccagtctgtagaattctcaactcccgtaacttcatttaggtcactacaggaaggtatatacctactgcggaacaacatccaagtatataatcatggggttgttcaccatcctccaattttgattttttttctttccctctttaattccgacaggttaatttccctcatatacgctttaattgatggattaattgcgtatcagctgacagaggtaacaaaggctttcaaaaacttgaaactgaaagtttggctacctggacttctttatgccgtgaatcctttgacccttttatcgtgcattagtcggtcatcaatcatattcacaaattttgctatttcatcgtcattgtattgcatattagctgaaggaaacgttcttttgtcctctgttatgatttctatatctggatatttgtcagtataccctattctcctcttaattccgctattaggtatgctgaaaagttggaggcaaagaatattatctgccattgtttccatactatctttattaattctgctattattcagctacagtatattaggcagccaaagttggtcatttttgacacaggtttatggatctattataacctttgagaaggtttttccaaatctgggtttgtggtggtacttcttcattgaaatgtttgacaccttcataccgttcttcaaggctgtattcaacatttttattgcagtattcattacaccatttactttgcgctatcataagcagccattctacgcattcattttatgcattgggtggattgtccttacaaagccatatccctcactaggtgacgctggttttttcttcagcttcctacctttcttcacgccactatttggatatttaagataccccatcatatcagcattactgtttttacacgcaattgttttggcgccaattttctatcatctttgggttgttttaggttcagggaatagtaattttttctatgctatttccctagtttatgctctggctatagcatctatattagttgacttgaactgggcgatgctgagaattgaatacgataacggtatcccaaatttcaaattgaaggtaacacaaatttaactacttcccgtctataaacgtacataaactagaataaaaagaaccatacagatg

SEQ ID NO: 2246 - DNA, 318 bp, Saccharomyces cerevisiae
atgatggacttgggcgacaaaataaatcctaacctctcgttcttaggaatcaactgcgtcagcttcaaccaatcacccgacattcttgagtctctacatcaagcactgccaaatatggccttgcttgcttatccaaacagtggtgaagtttatgatactgaaaagaagatatggttgccaaatagcgataagctgaacagttgggatacggttgttaaacagtacattagcagcggtgcccgtatcattggtggttgttgcagaacaagtccaaaagacatccaagagatttctgcagccgtcaagaaatacacgtaa

SEQ ID NO: 2247 - DNA, 2043 bp, Saccharomyces cerevisiae
gattcgatgctcttcatttagaaatacttgtttatataaatatacttcacacggcatgaattaattgataggtaagtaagtttcttttatcataagtcaaacagtatcagatataagaagggaaaaggtagatatagaaacctaataagacccttattattaaacattcgttaatcaaattatgggtaaaattgcagagtttctcgggaatccaggtgctaggcctgacgttcatcatagagcacctactgttgactgcaaacagtacgaagaattcggtgattctaacgattacaaaaatgatgatgtggtcagagtagtcagccatagcgatgagagtactgatgacgaactttgtaatgtgaatttaacagaaacaggggcaatcttcacgagtaaaggttttaccgggttaagcaaaggtttcacagataagaccctggatttcctggtacgagtggccggttcgcaggcggttttttttattgtttggatcatcctcataatttgggtggttattggtattgtttataacgcacctttcaattggcaagttgttatgcaggacggacagtctattcaaagttatgtttgggacacactgttgatgagacaacagttgatgagtacgcatgaacaaattttgatctgcggtagattgaagtcgagattggcttccttcaaaaactatctaacaagaagcaccccagaggaagaaaaagcagactgcacagttgaagctaatgaagtcagctctgttgaaaatcatatagacccatctgccattaacggagaactgcctgtggaaaattggtacgaccgtttatctaacgtagcaagtaggtatatgggttcaattgcagcaatggtgatattttggataggtattttcgtttggattggttgcggtgctatcccaaaagatgcgggcaacactccaccttacaccggagaaactacaggtagtaatccaagattgaaaaagttcagtgacgcttggcagatgtatattaacactgcagttgcagtttcccttctaatttgcactactttcttacaaaatataagggctagacatgattatttcacggggaggtttttagttgatatctttgatatggacgagaaaatcgactatcgtataagaaagcattttaacgattttgaaacacctcacccagttgttactattgaatctaaaaaaaggtcgacagggagaaagatgattgattggtatgctgatattattggtactggtattggtgtcctgattggtgtggcagtgttcgccacatggattggtattggttcgccaatgaagtgggatgataattggtggttgattatcggtacatacacaggtttaattgggtttttggacggtttcgttttgagagaagtgtacttccgaatcgttcaacatgaagagaaaaattattctgatgtggctaaagaagaccttgaattattccaagaattaggtattgaatgtcccgaagaatttagtggtaaagctcctgaaattaacactattggttacagaacatcccaatatattaataggatctgctcaactccatggagtgttcttgtatccgtcatcatcatcattggtttaatttgtattgcttccggtttgcgttggagtacaacaggtcaattgattgctaacacgccaactatgattatcgaagaatttttcttgctagttttgttgcaagcacataattgggccgatcgtcaaagaagagtggaggttaccgctttgtacgcacgtaggcgcatacttctatcatacgtagaaaagcgtttcccagaggttatgatgttggaaaaatagcttcattgaacattttagcattagtgggaagaattcctcatgttacttatgagggagttaattttccttagggattttaggaatttctatacggaggtagcgatcgaccttagaacttttatttagtttgtacatatacctcacctgagttttgcttttttctctgggagcctaaaccatttaaaatgatatataatagataa

SEQ ID NO: 2248 - DNA, 1331 bp, Saccharomyces cerevisiae
aatcttctgtataaattcggccaattcaatctaatttaatagatttgcgacagactttcacatccacattcgaggaagaaattcaacacaacaacaagaaaagccaaaatcatgtcttatcctgagaaatttgaaggtatcgctattcaatcacacgaagattggaaaaacccaaagaagacaaagtatgacccaaaaccattttacgatcatgacattgacattaagatcgaagcatgtggtgtctgcggtagtgatattcattgtgcagctggtcattggggcaatatgaagatgccgctagtcgttggtcatgaaatcgttggtaaagttgtcaagctagggcccaagtcaaacagtgggttgaaagtcggtcaacgtgttggtgtaggtgctcaagtcttttcatgcttggaatgtgaccgttgtaagaatgataatgaaccatactgcaccaagtttgttaccacatacagtcagccttatgaagacggctatgtgtcgcagggtggctatgcaaactacgtcagagttcatgaacattttgtggtgcctatcccagagaatattccatcacatttggctgctccactattatgtggtggtttgactgtgtactctccattggttcgtaacggttgcggtccaggtaaaaaagttggtatagttggtcttggtggtatcggcagtatgggtacattgatttccaaagccatgggggcagagacgtatgttatttctcgttcttcgagaaaaagagaagatgcaatgaagatgggcgccgatcactacattgctacattagaagaaggtgattggggtgaaaagtactttgacaccttcgacctgattgtagtctgtgcttcctcccttaccgacattgacttcaacattatgccaaaggctatgaaggttggtggtagaattgtctcaatctctataccagaacaacacgaaatgttatcgctaaagccatatggcttaaaggctgtctccatttcttacagtgctttaggttccatcaaagaattgaaccaactcttgaaattagtctctgaaaaagatatcaaaatttgggtggaaacattacctgttggtgaagccggcgtccatgaagccttcgaaaggatggaaaagggtgacgttagatatagatttaccttagtcggctacgacaaagaattttcagactaggttgtcaagctcttgataaatgtagctcctttctttttaactgctccatgttttgggtctgtatataggagtgctgttttaatcgatataggttacatttgaaacttttttttatgattataaggtactatttaaat

SEQ ID NO: 2249 - DNA, 1043 bp, Saccharomyces cerevisiae
gaccacaaagctgtgtatcacttagtttgatgagcagcacgaggaagttcaaaaaggttgagaaacctctatcacaaaccagacattattcactctgtatccccacgacattggtatcggactgtcgcaacctctctcaaatcacgcataaggtgtaccaagtggccaagtttgcatcgctgtttaatgtttctgaggttgtcattcttgaggacaattcccaggtcgatgccaccaaaaaaaaaatctccactgctaaattaatactggcacttttacaatacttcgtcacgcctccatatcttcgcaatactgtcttcaacgaaaaattcagaccttatttgaccgccgcttcaaaattaccaagattatccacacttcctttcaccaggtaccaaaagcaagatcacggtcggtacagagaaggcctcactatcaagatgcagaaacccaccttggctcgcaaaaagattggtaaggtattcaagcaaaccaaatatattaatatagggaaaagcaaagcactggctctacaaagtcagctggtgccgataaacgcaagggtcaccatcgacacaataacgaggaaaattgtatctcctcaggaagcttacggtgatttcaccggattggactcgcagtatggctactatactcgtatagcgtcatcgttcacagacttgtttatgaaggggcctttaaaagagggttatacacaatcagtatatgttcccttaaccacgagagacacctctattcccgagttatcatcactgcctaccgccgaaactaatccccacatcttattggtattctcaacgtgggacactcttgctcgagcattcaaactggatcaagatcaattcgtagattgtcaaggtcctcaagagttctttgatgctcagctaccatgccccgtatccaattcggacgttgcagatgcaatccccatgacactgacaactctttcaactgtattttaatcccaaattaccttcatgcaatggataagtacgtatatattagagacgcaatcattatta

SEQ ID NO: 2250 - DNA, 2663 bp, Saccharomyces cerevisiae
aggagaacaaggcacatatttgcaatcttcacacaatagcctgccaagcccgagatctacgaaaatgtcccgtttcttttcgtctaattacgaatacgatgtagccagttcttcatccgaagaagatcttttatcttcgtctgaagaagatttgttaagctcttcctcctctgagtctgaattggaccaagaatctgacgactcctttttcaatgaaagtgaaagtgaaagtgaagctgatgtagactctgatgattctgatgcaaagccttatggtcctgactggttcaagaaatctgagttcagaaaacaaggtggaggttcaaataaatttttgaaaagctctaactatgattccagtgatgaagaatccgatgaagaagatggcaagaaggtagtcaagtctgccaaagaaaaactattggatgaaatgcaagacgtttataataagatctctcaagctgagaactctgatgactggttgactatttctaatgagtttgatttgatctcgcgtctcttagttagggctcaacaacaaaactgggggactccaaatattttcatcaaggttgttgcccaagtggaggacgctgtgaataatacacaacaagctgatttgaagaataaagctgttgcaagagcttataacactacaaagcaaagagtcaagaaagtttctagagaaaatgaagactcaatggctaaattcagaaatgatcctgaatcatttgataaggaaccaaccgcagatttggatatttctgctaatggattcacaatttcttcgtctcaaggcaatgaccaagcggtacaagaagatttcttcactagattacaaacaataattgactcaagaggtaagaagactgtcaatcaacaatccttgatttctactttggaggagttattaactgtagctgaaaaaccatatgaattcataatggcttatttgactttgattccatcaagattcgatgcctcagctaacctatcttaccaaccaattgatcaatggaaatcttcattcaacgatattagtaaattattgtctattttagaccagacaattgacacctaccaagttaatgaatttgctgatccaatcgatttcattgaagatgaacctaaagaagattctgatggtgtcaagaggattctgggttccattttctcatttgttgaaagattagatgacgaattcatgaaatccctgttaaacatcgatcctcattccagtgattatttgatccgtttaagggatgaacaatcaatctataatttgatcctaagaactcaattgtactttgaagcgactttgaaagatgaacacgacctagaaagagcattgacacgtccattcgtcaagagattggatcatatctactataaatccgaaaatttgataaaaattatggaaactgctgcttggaatatcatacctgctcaattcaaatctaaatttacttcaaaagaccagctcgattctgctgattatgtcgacaatttaatagacggattatcgacaatcttatccaagcaaaacaacattgctgttcaaaaacgtgctattttatacaacatttactacactgcattaaacaaagatttccaaactgctaaagatatgttactaacttcccaagttcaaacaaatatcaaccaattcgattcatccctacaaattttattcaacagggttgttgttcaattgggtctatccgcctttaaattatgtttgattgaagaatgtcatcaaattttgaatgatcttctgtcaagttctcacttaagagaaattttgggccaacaatccctacacagaatatctctcaattctagtaacaatgcttcagctgatgagcgtgctagacaatgtttgccatatcaccaacacatcaatctcgatttaatcgatgtcgtcttcttaacatgttccttattgatcgaaattccaagaatgactgccttctattccggtattaaggtcaagagaattccttactctccaaaatccattcgtcgttccttagaacattacgacaagttaagtttccaaggtccaccagaaactttaagagattatgtcttgtttgctgccaaatcaatgcaaaaaggtaactggagagactctgttaaatacttaagagaaataaaatcttgggctttattaccaaacatggaaacggtgttgaatagtttaacggaaagagtacaagttgaatctttgaagacttatttcttttctttcaagaggttctattcaagtttttctgttgctaaactagccgaattatttgatcttccagaaaataaggtggttgaagttttgcaatctgttatcgcagaattggaaatcccagccaaattaaacgacgagaagaccatctttgttgtcgaaaagggtgatgaaattactaaattggaagaagcaatggtaaaattgaacaaagaatataaaatcgctaaagaacgtcttaacccaccatcaaatcgtcgttgatcaataaaatcaaaaactacttcgaaagcattcttaacaaaaaatcattgtagatagaagaataacatcagcaaccaaaaaatatagaaggaaactaagcaggagagtataaaccatattcacttttgctttttattcttgatattgctcatcttttttt

SEQ ID NO: 2251 - DNA, 3429 bp, Saccharomyces cerevisiae
ttcagataccgagtggctaatagactgagtagatcaaagtggcagatagcccaaacaaaagtaattagcttgcaagccactttatcctaacgacacgtgatttcaaccgtaactagagccatcgctatgtctgctttaccggaagaagttaatagaacattacttcagattgtccaggcgtttgcttcccctgacaatcaaatacgttctgtagctgagaaggctcttagtgaagaatggattaccgaaaacaatattgagtatcttttaacttttttggctgaacaagccgctttctcccaagatacaacagttgcagcattatctgctgttctgtttagaaaattagcattaaaagctcccccttcttcgaagcttatgattatgtccaaaaatatcacacatattaggaaagaagttcttgcacaaattcgttcttcattgttaaaagggtttttgtcggaaagagctgattcaattaggcacaaactatctgatgctattgctgagtgtgttcaagacgacttaccagcatggccagaattactacaagctttaatagagtctttaaaaagcggtaacccaaattttagagaatccagttttagaattttgacgactgtaccttatttaattaccgctgttgacatcaacagtatcttaccaatttttcaatcaggctttactgatgcaagtgataatgtcaaaattgctgcagttacggctttcgtgggttattttaagcaactaccaaaatctgagtggtccaagttaggtattttattaccaagtcttttgaatagtttaccaagatttttagatgatggtaaggacgatgcccttgcatcagtttttgaatcgttaattgagttggtggaattggcaccaaaactattcaaggatatgtttgaccaaataatacaattcactgatatggttataaaaaataaggatttagaacctccagcaagaaccacagcactcgaactgctaaccgttttcagcgagaacgctccccaaatgtgtaaatcgaaccagaattacgggcaaactttagtgatggttactttaatcatgatgacggaggtatccatagatgatgatgatgcagcagaatggatagaatctgacgataccgatgatgaagaggaagttacatatgaccacgctcgtcaagctcttgatcgtgttgctttaaagctgggtggtgaatatttggctgcaccattgttccaatatttacagcaaatgatcacatcaaccgaatggagagaaagattcgcggccatgatggcactttcctctgcagctgagggttgtgctgatgttctgatcggcgagatcccaaaaatcctggatatggtaattcccctcatcaacgatcctcatccaagagtacagtatggatgttgtaatgttttgggtcaaatatctactgatttttcaccattcattcaaagaactgcacacgatagaattttgccggctttaatatctaaactaacgtcagaatgcacctcaagagttcaaacgcacgccgcagcggctctggttaacttttctgaattcgcttcgaaggatattcttgagccttacttggatagtctattgacaaatttattagttttattacaaagcaacaaactttacgtacaggaacaggccctaacaaccattgcatttattgctgaagctgcaaagaataaatttatcaagtattacgatactctaatgccattattattaaatgttttgaaggttaacaataaagataatagtgttttgaaaggtaaatgtatggaatgtgcaactctgattggttttgccgttggtaaggaaaaatttcatgagcactctcaagagctgatttctatattggtcgctttacaaaactcagatatcgatgaagatgatgcgctcagatcatacttagaacaaagttggagcaggatttgccgaattctgggtgatgattttgttccgttgttaccgattgttataccacccctgctaattactgccaaagcaacgcaagacgtcggtttaattgaagaagaagaagcagcaaatttccaacaatatccagattgggatgttgttcaagttcagggaaaacacattgctattcacacatccgtccttgacgataaagtatcagcaatggagctattacaaagctatgcgacacttttaagaggccaatttgctgtatatgttaaagaagtaatggaagaaatagctctaccatcgcttgacttttacctacatgacggtgttcgtgctgcaggagcaactttaattcctattctattatcttgtttacttgcagccaccggtactcaaaacgaggaattggtattgttgtggcataaagcttcgtctaaactaatcggaggcttaatgtcagaaccaatgccagaaatcacgcaagtttatcacaactcgttagtgaatggtattaaagtcatgggtgacaattgcttaagcgaagaccaattagcggcatttactaagggtgtctccgccaacttaactgacacttacgaaaggatgcaggatcgccatggtgatggtgatgaatataatgaaaatattgatgaagaggaagactttactgacgaagatcttctcgatgaaatcaacaagtctatcgcggccgttttgaaaaccacaaatggtcattatctaaagaatttggagaatatatggcctatgataaacacattccttttagataatgaaccaattttagtcatttttgcattagtagtgattggtgacttgattcaatatggtggcgaacaaactgctagcatgaagaacgcatttattccaaaggttaccgagtgcttgatttctcctgacgctcgtattcgccaagctgcttcttatataatcggtgtttgtgcccaatacgctccatctacatatgctgacgtttgcataccgactttagatacacttgttcagattgtcgattttccaggctccaaactggaagaaaatcgttcttcaacagagaatgccagtgcagccatcgccaaaattctttatgcatacaattccaacattcctaacgtagacacgtacacggctaattggttcaaaacgttaccaacaataactgacaaagaagctgcctcattcaactatcaatttttgagtcaattgattgaaaataattcgccaattgtgtgtgctcaatctaatatctccgctgtagttgattcagtcatacaagccttgaatgagagaagtttgaccgaaagggaaggccaaacggtgataagttcagttaaaaagttgttgggatttttgccttctagtgatgctatggcaattttcaatagatatccagctgatattatggagaaagtacataaatggtttgcataaagacgtttaatagaaagaagaacaatgttaagt

SEQ ID NO: 2252 - DNA, 1461 bp, Saccharomyces cerevisiae
ttaaatactatacttttgcaatattgagctgaacatccaactgtcacgtctctcctttactattactgttctttttttcaaattgtcaaaagatagtattaacgcaaaaaaagtcttcattccattatgcgtttttcaaatttcctaactgtatctgcattattaaccggagctctaggagctcctgctgttcgccataaacatgaaaagcgtgacgttgttactgccacagtccatgcgcaggttactgttgtcgtttccggtaacagcggcgaaactattgttccagtgaacgagaatgctgttgtagctactaccagcagtactgcagttgcttctcaagcaactacatccactttagaaccaacaacttccgctaatgtcgtcacttctcaacaacaaaccagcactcttcaatcttccgaggcagcatctacggttggttcttcgacttcatcctcaccctcatcctcatcctcaacttcatcttcagcttcatcctccgcttcatctagtatctcagcctccggtgctaagggtattacttacagtccttacaatgatgatgggtcctgtaaatctactgctcaagtcgcctcagatttagaacagttgactggttttgacaacatcagattatatggcgttgactgtagtcaggttgagaatgtcttgcaagctaaaacttcaagccagaaattattcttaggcatatattacgttgacaaaattcaagacgccgttgatactattaaatctgcagttgagtcttatggctcctgggatgatattaccactgtttctgtcggtaacgaactggtcaatggcggttctgccactacgacgcaagtcggtgaatacgtttccacggccaagtcagctttaacctctgctggttatacaggctcagtcgtttccgttgataccttcattgctgttataaataaccctgacctgtgtaattattctgactatatggctgtcaacgcccatgcatacttcgatgaaaatactgcggcccaagatgcaggaccatgggtactagaacaaatcgaaagggtttacactgcttgtggtgggaaaaaggacgtcgttattaccgaaactggttggccatctaagggtgatacttacggcgaagctgtcccatctaaagcaaaccaagaagccgccatttcttctatcaaaagctcctgcggctcttcagcttacttatttaccgccttcaatgatctatggaaagatgatgggcaatacggtgttgaaaaatactggggtattctatcaagtgattaaaccactgaaacttcatttactttatgatcattctttttccctttttcttaaaaagcagccaaatatgggggaaataagccctttcccatatttgctctcctattcttatcacgttattgtttacttatgtgttttgtgtaaagtatatattctatactcatttgt

SEQ ID NO: 2253 - DNA, 1099 bp, Saccharomyces cerevisiae
aaaaagcatacaatcaactatcaactattaactatatcgtaatacacaatgtctattccagaaactcaaaaagccattatcttctacgaatccaacggcaagttggagcataaggatatcccagttccaaagccaaagcccaacgaattgttaatcaacgtcaagtactctggtgtctgccacaccgatttgcacgcttggcatggtgactggccattgccaactaagttaccattagttggtggtcacgaaggtgccggtgtcgttgtcggcatgggtgaaaacgttaagggctggaagatcggtgactacgccggtatcaaatggttgaacggttcttgtatggcctgtgaatactgtgaattgggtaacgaatccaactgtcctcacgctgacttgtctggttacacccacgacggttctttccaagaatacgctaccgctgacgctgttcaagccgctcacattcctcaaggtactgacttggctgaagtcgcgccaatcttgtgtgctggtatcaccgtatacaaggctttgaagtctgccaacttgagagcaggccactgggcggccatttctggtgctgctggtggtctaggttctttggctgttcaatatgctaaggcgatgggttacagagtcttaggtattgatggtggtccaggaaaggaagaattgtttacctcgctcggtggtgaagtattcatcgacttcaccaaagagaaggacattgttagcgcagtcgttaaggctaccaacggcggtgcccacggtatcatcaatgtttccgtttccgaagccgctatcgaagcttctaccagatactgtagggcgaacggtactgttgtcttggttggtttgccagccggtgcaaagtgctcctctgatgtcttcaaccacgttgtcaagtctatctccattgtcggctcttacgtggggaacagagctgataccagagaagccttagatttctttgccagaggtctagtcaagtctccaataaaggtagttggcttatccagtttaccagaaatttacgaaaagatggagaagggccaaattgctggtagatacgttgttgacacttctaaataagcgg

SEQ ID NO: 2254 - DNA, 2247 bp, Saccharomyces cerevisiae
acattaataatcgcaaacaaagcaatcagcacagcaaagagtacaatttcgaaaattgcgacagagcaacgtaagtatatcgttgttgatagattccactccaacctgcaaatgctgcttcttccaagatgtcctgtaattgggcgaattgtaagatcaaaatttagatctggtctaatccggaaccattcgcccgttatatttactgtgtctaagttatcaacccagcggcctctgttattcaattcagctgtgaatttatggaatcaagcacaaaaggatattacgcacaaaaaatccgtcgagcaattctcgtcggctccaaaagtgaagactcaggtaaaaaagaccagcaaggccccaaccctctcggaactgaaaatcttgaaagatctatttcgctatatttggcccaaaggcaacaataaagtgaggataagggtactgattgcccttggactgttgatatccgccaaaattttaaatgttcaagtacctttttttttcaagcaaactattgattcaatgaatatagcatgggatgatcctacagtcgcccttccggcagcgattggattaaccattctttgctatggtgttgcaaggttcggctctgttttattcggcgaactgaggaacgccgtatttgccaaagtggcacagaatgccattagaactgtgtcgctacaaactttccagcaccttatgaagttagatttgggatggcacttgagtagacaaacgggtggtctgacgagggccatggatagaggtacaaagggtatatctcaagtgttaacggccatggtattccacattatccctataagttttgaaatatctgtcgtttgtgggattttgacgtatcaattcggtgcgtcatttgccgcaataacattcagtacaatgcttttatactccattttcactataaagacgaccgcatggaggacacattttagaagggatgctaacaaggccgataacaaagctgccagtgtggctttagattctttaattaattttgaggcggtaaaatacttcaacaatgaaaaatatcttgcagataagtataatggctccttgatgaactatcgtgactctcaaattaaagtatcgcaatctctagcatttttgaactccggccaaaatctaatttttactactgccctaactgcaatgatgtatatgggttgcaccggcgttattggtggcaacttgacagttggtgacttggttctaattaatcagttggtttttcaactatcagtaccgctaaattttcttggtagtgtttacagagatttaaagcagtctctgattgatatggaaacgctatttaagttaagaaaaaatgaagtcaagattaaaaatgccgaacgtcccttaatgcttccagaaaatgttccctacgatattacttttgagaacgtcacgtttggatatcatcccgataggaaaattttaaagaatgccagctttaccatcccagcaggctggaaaaccgcaatagttgggtcttcgggcagtgggaagtccaccattttaaaattagtctttagattttatgatcctgaaagcggaaggatcctcataaacggtagagatattaaagaatatgacatcgatgccttgaggaaggtgattggtgtggtaccacaggacacaccacttttcaatgacactatctgggaaaatgtaaagttcggtcgtattgacgcaaccgacgaggaagtgataactgtagttgaaaaagcccagctagcacccttaatcaagaaattaccacaaggttttgacaccatcgtcggggagcgagggttgatgatcagcggtggtgaaaagcaaaggctggcaattgcaagggtactattgaagaatgcaaggatcatgttttttgacgaggccacaagcgccttggacacacacacagaacaagctctcttacgaaccattagagataactttacttcgggttcgagaacgagtgtatacatcgcacatagactgaggacaattgcagatgcagacaagatcatagtccttgacaacggaagagtaagagaggaaggtaagcatcttgaactgttggctatgccagggtcattgtaccgcgaactttggaccatacaagaagatctggatcatttagagaatgaactaaaagaccagcaagaactatgaacgctcgtaagtaaatattgatttatacatgtataagtttttcaagatttaaggaaaaaagaa

SEQ ID NO: 2255 - DNA, 1689 bp, Saccharomyces cerevisiae
cgtacaattttattcacttttaagtcatagttgcgaagacatcgtcttgaaagtagtagatttcgttctaataagtttagcaaagaaagaggtacagcaaacagcagaatagaaaaaatgtgtggtattttaggtattgtattagcaaaccaaaccactccagtagctccggagttatgtgatggatgcatttttctacaacatcgtggacaagatgcagctggtatagctacctgtggttctcgtggtagaatctaccaatgtaaaggtaatggtatggctcgtgacgtatttacccaacaacgtgtttccggtcttgctggttccatgggtattgcccacttgagatatcctacagccgggtcttcggctaattcagaagcgcaaccattttacgtcaatagtccttacggtattaacttggcacataacggtaacttggtgaatactgcatcattgaagagatatatggatgaagacgttcatagacatattaacacggacagtgattcggagttactattgaatatttttgctgctgaactggaaaaacataacaagtacagagttaacaatgaagatgttttccacgcgttagaaggtgtttaccgtttatgccgtggcggttatgcttgcgttggtttacttgccggttttgcattatttggtttcagagatccaaatggtattaggccattattgttcggtgaaagagaaaatccggacggcactaaggactatatgttagcttcagaaagtgttgttttcaaagctcacaactttactaaatatcgtgacttaaagcctggcgaggcagttatcatccctaagaactgtagcaaaggtgaacctgagttcaaacaagtggttcctattaactcttatagacctgatttatttgaatacgtatatttcgccagaccggacagtgtcttggatggaatatcagtttatcacacaagattggctatgggttctaaattagcggaaaatattctaaagcaactgaagccagaagatattgatgttgttattcccgtcccagatactgcaagaacatgtgcactagaatgtgctaatgtgttagggaagccttatagagagggctttgttaaaaacagatacgtgggcaggacatttatcatgccaaaccagagggaaagggtttcttcagtaaggaggaagcttaaccctatggagtctgaatttaagggtaagaaggttctgatagtggatgattctattgtcagaggtactacttcaaaagagattgttaacatggccaaggaatccggtgcaacaaaggtttacttcgcttcagctgccccagccattcgttacaaccatatttatggtattgacttaacagacacaaagaacttgattgcttataacagaaccgatgaagaagtggcggaagtaatcggttgtgaaagagtcatttaccaatcattggaagatttgattgattgttgtaaaactgataaaataaccaaattcgaagatggtgtatttaccggaaattatgtcactggtgttgaagacggttatattcaagaattggaagaaaaacgtgaatcgatcgcaaataattcatcagatatgaaggctgaagtcgatatcggattatataattgtgcagattattgatagattgttccgaacttgttcagttgtatgtaaaatagt

SEQ ID NO: 2256 - DNA, 1821 bp, Saccharomyces cerevisiae
ctctaaccttctgcctggcctccaatatacacattttgctcgtgtagggttatttatccttttttcttccttcccacccaaaaaaaaaaagcaatggcacacatcccagaggttttacccaaatcaataccgattccggcatttattgttaccacctcatcgtacctatggtactacttcaatctggtgttgactcaaatcccgggaggccaattcatcgtttcgtacatcaagaaatcgcatcatgacgatccatacaggaccacggttgagatagggcttattttatacgggatcatctattacttgtccaagccacaacagaaaaagagtcttcaagcacagaagcccaacctatcgccccaggagattgacgcgctaattgaggactgggagcccgagcctctagtcgacccttctgccaccgatgagcaatcgtggagggtggccaaaacacccgtcaccatggaaatgcccattcagaaccatattactatcaccagaaacaacctgcaggagaagtataccaatgttttcaatttggcctcgaacaactttttgcaattgtccgctacggagcccgtgaaagaagtggtcaagaccactatcaagaattacggtgtgggcgcctgtggtcccgccgggttctacggtaaccaggacgttcattacacgttggaatatgatttagcacagttctttggcacccaaggttccgttctgtacgggcaagacttttgtgccgcaccctctgttctgcctgctttcacaaagcgtggtgatgttatcgtggcagacgaccaggtgtcattaccagtgcaaaatgctctgcaactaagcagatccacagtctactacttcaaccacaacgatatgaattcgctagaatgtttattaaacgagttgaccgaacaggagaaacttgagaaactgcccgccattccaagaaaatttatcgtcactgagggtattttccacaactcgggcgatttagctccgttgcctgagttgactaagctgaagaacaagtacaagttcagactatttgttgacgaaaccttctccattggtgttcttggcgctacgggccgtgggttgtcagagcacttcaacatggatcgcgcaactgccattgacattaccgttgggtccatggccaccgcgttggggtccaccggtggttttgtcctgggtgacagtgttatgtgtttgcaccagcgtattggttccaatgcatattgtttttctgcctgtttgccggcttacaccgtcacatccgtctccaaagtcttgaaattgatggactccaacaacgacgccgtccagacgctgcaaaaactatccaaatctttgcatgattcctttgcatctgacgactccttgcgttcatacgtaatcgtcacgtcctctccagtgtctgctgtcctacatctgcaactgactcccgcatataggtctcgcaagttcggatacacctgcgaacagctattcgaaaccatgtcagctttgcaaaagaagtcccagacaaacaaattcattgagccatacgaagaggaggaaaaatttctgcagtccatagtagatcatgctcttattaactacaacgttctcatcacaagaaacactattgttttaaaacaggagacgctaccaattgtccctagcttgaaaatctgctgtaacgccgccatgtccccagaggaactcaaaaatgcttgcgaaagtgtcaagcagtccatccttgcctgttgccaagaatctaataaataaaaatagaaagccagtatatgcacacgcacatatatatataaatatttatac

SEQ ID NO: 2257 - DNA, 809 bp, Saccharomyces cerevisiae
cagcaaacatcaaacaaggttaaaacagcacaccaaggcaatatgatgcattttagaaagaaatccagtatcagtaacacgagtgatcatgacggagcgaaccgtgcctcagatgtcaagatttctgaagatgacaaggcaagattgaagatgcgtactgcttccgttgctgatcctattctagacgctgtgcaggaagcccaaccttttgaacaagctgctgataccttccacgacaacatgaacagacaatcttatttttccaacgaagaaggtcatgttctgtgtgatgttttcggtcaacccatcacacaggcagatatatcgaatccaactagggcaagagacgaaagacctttggacactataagaagtttcgagtatgctgtctccggagacccggtctgggcccaacagttggagactccaacttacgggttccgcgtaagacctgatttccctgtgtttggtgctgctgtgacttacgatgcgaacggtatgccacagcaagtgggtggtgcttccagtcaaatgtatggtgaacaagcagtgtatcagccacaacaacacgtacagactgaggaaaagcaaaagaagaagaagaagggattgtttggtagaatgaagaagaaataagcgcttgataccctttagagactttatttttttcttttttatgataatttctgttttccgctcttattttggatatttcatatttcatattgttattattactattattatatatacatacacacacatattttcaatttttttgtcatatggagacgaaaaaatgaagaatg

SEQ ID NO: 2258 - DNA, 1723 bp, Saccharomyces cerevisiae
atggctaccccgtcaaataaacgttctagagattctgaatctacagaagaacctgtagtagatgaaaagagcacttcaaaacaaaacaatgccgcacctgagggagaacaaactacttgtgtggaaaagttcgaagaactaaagttatcacagccaactttaaaggccattgaaaagatgggatttaccactatgacttctgttcaggcaaggactatcccacctcttttggccggtagggatgttcttggtgctgccaagacaggttctggtaaaactctagcgtttctcatccctgctattgaactattgcattctttgaaattcaaaccaagaaatggtaccggtataattgtcattacgcctacaagagagttggctttacagatttttggagtggcaagagagttaatggaattccattcacagacatttggtattgtcattggtggtgcaaatagaagacaggaagccgaaaaattgatgaaaggtgttaacatgttgattgctacccctggaagattattggatcacttacaaaatacaaaaggatttgtattcaagaacttgaaggctttgattatcgatgaagcggacagaatcttagaaattgggtttgaagatgaaatgaggcagataattaagatcttgccaaacgaagataggcaatccatgttattttcagctacacaaacgaccaaagttgaggatttggctagaatctcgctgagaccgggccctcttttcattaatgtcgttcctgaaaccgacaactccaccgcagatggattagaacaaggctatgtggtatgtgacagtgataagagatttttgttgttattttctttcttgaaaagaaatcaaaaaaagaaaattattgtatttttatcatcttgtaactctgtgaaatattacgctgaattattgaactatattgatttgccagtcctcgaattacacggtaagcaaaaacaacaaaagagaacaaatacatttttcgaattctgtaatgcggaaagaggtatcttgatttgtacagatgtcgcagctagagggctagatatccctgctgtggactggatcattcaattcgaccctcctgatgatccaagagattatattcatagagtcggaagaaccgcaagaggcactaaaggtaagggtaaatctttaatgtttttaacacctaatgaattagggtttttaagatatctaaaggcttccaaggtcccattaaatgagtacgaattcccggaaaacaaaattgcaaacgttcaatcacaattagaaaaattaattaaatccaactattatctacatcaaacagccaaggatggttatagatcttatttacaagcgtacgcttcccactctttgaaaactgtctatcaaatcgataagctggatttagccaaagtagcaaagtcttacggttttccagtccctccaaaggttaacattacaattggtgccagtggaaaaacgccaaataccaaaagacgtaaaactcataagtaatttcagaggatcaatttttaatgctattaatgtgtacgtggaaccaacacaaccgaagtattcatcttctgttctcatcgcactccttttcctttctctgcttctccactgtatgtcatttaaataaatgtataaaccgctgttttctgtttgttgtcttctacgtacgttgtctgtatcaacctgcacatatttgagtatgtaa

SEQ ID NO: 2259 - DNA, 948 bp, Saccharomyces cerevisiae
atgctacaattctcaacatttctagtgctcctatacatctccatatcctatgtgctaccgctatatgcaacttcacaaccagaagggtctaaacgagataatcctcgaacgattaaatctcgcatgcaaaaacttacaattatgctaatttccaacctttttttggtgccttttttacaatctcaattatctagtaccacttcacatataagtttcaaggacgcatttttaggcttaggtattatcccaggttattacgctgcattgccaaacccttggcaattcagccagttcgtgaaagacttaacgaaatgtgttgcgatgttattgaccttatattgtggacccgttttagattttgtattatatcatttattaaatccaaagagctctatacttgaagatttttaccatgaattcctgaatatttggagtttcaggaattttatatttgcaccaataactgaggaaatattttacacgtcaatgcttttgactacgtacttaaacctaataccgcattcgcaactaagctatcaacagttattttggcaaccatcgcttttttttggacttgcgcacgcacaccatgcttatgagcaattacaggaaggctccatgacaactgtttccattctgctgacaacatgcttccaaattttatacacaacactttttggagggttaaccaagtttgtattcgtaagaacaggcgggaacctatggtgctgcataatcctgcatgccctttgcaatatcatggggtttcctggtccttcaagattgaatttacatttcacagtagtagacaagaaagctggacgcatttccaaattggtctcaatctggaataagtgctacttcgcactgctggtccttggattaatatccctgaaggataccttacaaactctggtaggaactcctggttatagaataaccctttag

SEQ ID NO: 2260 - DNA, 1340 bp, Saccharomyces cerevisiae
aaagcggtggtaagctaaaactagtacgaagatgtcgactaatacttccaagactttggaactgttttcaaaaaagacggtacaagaacacaatactgccaatgactgctgggtcacttatcaaaacagaaagatttatgacgtgaccaggtttttgagcgaacaccctggtggtgacgagtccatcttggactatgctggtaaggacattactgagatcatgaaagactcagatgtgcatgaacacagcgactccgcgtatgaaatccttgaggacgaatatttgattggttacttggcaactgacgaagaggcagcgagattgttgactaacaagaaccataaggttgaagtgcagttgtcagctgacggtactgagtttgactccactacttttgtaaaggagttgcccgccgaggagaaactaagtattgctacggactacagtaacgactacaaaaagcataaatttttggatctgaaccgtcctttgctgatgcagattctgcgtagtgatttcaagaaagatttttacgttgaccaaatccatagaccaagacattacggtaaggggtctgccccgctatttggtaatttcttggaaccattaactaaaacagcttggtgggttgttccagttgcttggttgcctgtagttgtgtaccacatgggtgttgctttgaagaacatgaaccagctatttgcatgtttcttgttctgtgtcggtgtctttgtttggactttgattgaatacggtcttcaccgtttcctatttcatttcgatgattggttacctgaaagtaacatcgcattcgccacacattttctactacatggttgccatcattacttgcccatggacaagtaccgtttagttatgccacctactctgttcgtcatcctttgtgctccattttacaagttggtatttgctctgctgccactttattgggcttacgctggttttgctggcggtcttttcggttatgtctgttatgacgaatgtcatttcttcttgcaccactctaaattgcctcccttcatgcgtaagttgaaaaaatatcacctggaacatcattataaaaactaccaactgggatttggcgtcacatcctggttttgggacgaagtttttggcacctacttaggccccgatgccccattgtccaaaatgaaatatgaataattattggtcagcctcgtccaaaattgtcaacctaggaaaaacaacattacgagcaatgaaatcttgagcaaagttcttttctgcgacatatttatttcaaatctttatttatattattatatgtaactacgtatatatacatacacatggaatg

SEQ ID NO: 2261 - DNA, 3457 bp, Saccharomyces cerevisiae
cgagcaaacattcaatagtattaagtctaagacataagttttaagtaccgttgctattccgcttcatcttttatcacaataaaacagtacaaacgttattgcaggtcctggctttataatttattgcttcctattcaaaaaaccacagactaataaccacgggcaacctcaatgactattatcgtcgcttctttattcttaccatatacccctcaattcgaggctgatgtcaccaactcggatactgctaagctggttgaatcaagtatgatcaaggtagactgcaacaaccaggaattgagcaacaacaagcaagaaagaagcagttctgtaacttcggcaagctctcattatattggcttacctcaggaggcgcaaattaacggtgaacccttacaaagggccaatgtgggctctcctgctacgggagttaactatcataatgagatggaaatgctttcctcagagcaattcctggaagagctgactgccaatgccactcatgcagcaaactctggtattccgccagctaataacccagtttcttctggctcaactgcccagcggccttcagtcgaggaattcttttctgctccgtctgctagagtctgttctccctcccaggaagcttctgcttcgtctatttctgctagtcgttcatcggctcaccacaacgatttgagctccagccttatgaaaaatcccaatttgtcatttgattcacatccacccagggtcagaagctcatccaagagtgctgtaatcactcccgtctctaaaagcgttccagatgtcgatcctgctgttgtagatgtcgcaaaagttagagaagagtttcaacagcaagcctccttgccttccatgaaaagagtttccggaagcaccgctggagactcttccattgcttcttcgagttctaatctcaggtactcacagcaatttcaggataactttatcgaagacactgatagtgaggatgacattgattctgatttggagaccgatgctactaagaaatacaacgtcccaaaatttggtggctattccaataacgcaaagttaagagcatctctaatgagaaactcgtatgagctattcaaacatttgccatggacaatagtcgacagtgacaaagggaacggatccttgaaaaatgcagttaatattgcagttgctgaaaagacagtgaaagaacctgtttcctgggtaggtacaatgggaatccctactgacgaacttcctcacgaagtttgccataagatttcaaagaaattagaacaggatttttcttcttttccagtggtcacggacgatattacttttaagggtgcttataagaactacgccaaacagattttatggcccactctacattatcaaattccagataatccaaattcaaaggcttttgaagaccattcttgggactactatcaaaaagtgaatcaaaagttttctgataggatagtttccgtttacaaacctggcgacacaatttggatccatgattatcatttgatgcttgtcccacaaatggtgagagagaaactgcctaaagctaagattggatttttcttacacgtatcatttccaagtagtgaggtcttcagatgccttgctaacagagaaaggattcttgaaggtattattggtgcaaactttgttgggtttcaaactaaagaatacaaaagacatttcctacaaacttgtaacagattgcttgctgcggatgtctctaatgatgaagtcaaataccattgcaatattgtttccgtgatgtatgcgccaattggtattgattattaccatttgacatcgcagttgagaaatggttctgtacttgaatggcgccaattaattaaagaaagatggcgtaataaaaaactgattgtttgtcgcgatcaatttgacagaattagaggtcttcagaaaaaaatgttagcctacgagaggtttttgatagaaaaccctgaatacatcgaaaaagttgttttgatccaaatctgcatcggtaagagttccgatcctgagtacgaacgtcaaattatggttgtcgttgatagaatcaattctttgtcttcgaacatcagtatctctcaaccagtggtctttttgcatcaagatttagattttgctcaatatttggcattgaattgtgaagctgacgttttccttgtggatgcgctgagagaaggtatgaatttaacatgtcatgagttcattgtcagttcattcgaaaaaaatgcgcctctattattatctgaattcactggtagttcttctgtcctaaaggaaggtgccatcttaataaacccatgggatataaatcatgtagcacaaagtatcaagagaagtttagaaatgtctccagaagaaaaaaggcgtaggtggaaaaaattattcaaatctgttattgaacatgattcggataattggattacaaagtgcttcgaatacataaataatgcttgggagtccaaccaagaaacgtctactgttttcaatttggctccagaaaaattctgtgctgattacaaagcctccaaaaagcatttatttatcttcaagatttcagaacctccaacgtccagaatgctatccttgctaagtgaattgagttcaaataatatagtttacgttttgagttcatttacaaagaatacattcgaaagcttatacaatggtgttctaaacatcggattgatagcggagaatggtgcctacgtaagagttaatgggtcgtggtacaacatcgtggaagagcttgattggatgaaagaggtggcaaagatctttgacgagaaagtcgagaggttacctggttcatactacaaaatcgctgattctatgatcagattccatacagaaaacgctgatgatcaagatcgagtcccaactgttattggggaagccattacgcacataaacaccttatttgatgacagggatattcacgcttatgtgcataaggatattgtcttcgttcaacaaacggggctagccttagccgccgctgagtttttgatgaaattttacaacagtggcgtcagtcctactgacaatagcagaatatctctatcaagaacatcctcttcgatgtccgtcggtaataataagaagcatttccaaaaccaggtagatttcgtttgcgtttccggttcgacatcacctattattgaaccattatttaaattagtgaagcaagaggttgaaaagaacaatctaaaatttggttacaccattctttacggtagctcaagatccacttatgccaaggaacatatcaatggtgtcaatgaactttttaccatccttcatgacttgacagccgcctaagcgatcattttccctcctgtactttcaaaatgttctctttcttattcttcagttatagtttttacgagcgattataaatataaaagtacgatcttccttttacgtatatatgtatatacag

SEQ ID NO: 2262 - DNA, 616 bp, Saccharomyces cerevisiae
aatatagagcaaagttcatcatgggtaagaaaaacactaaaggtggtaaaaaaggtagaagaggtaagaacgactctgacggtccaaagcgtgaacttatttataaggaagaaggccaagaatatgctcaaatcaccaagatgttgggtaatggaagagtcgaagccagttgctttgatggtaataagagaatggcccatattagaggtaagttaagaaagaaagtctggatgggacaaggtgatattattcttgtttccttaagagatttccaagatgaccaatgtgatgttgtccacaaatataatttagatgaagccagaacactgaaaaaccaaggtgaacttcctgaaaacgccaaaattaatgaaacagacaactttggtttcgaatctgatgaagacgttaactttgaatttggtaacgctgatgaagatgatgaggaaggtgaagatgaagaacttgatattgatgacatttaatttaggccgaacaagtgtcctcaatatcttctaatgcgtcaactattcataatttatttataattatattttttagtccatcataggaaagggttttctttttactatatcgaaatacttatatatagatatca

SEQ ID NO: 2263 - DNA, 1722 bp, Saccharomyces cerevisiae
aacgacagttgtgctcacatgatataacaaaagtaatactgacaaatggcattccaagatcaagatatattcatagtgttctcgcatgcctccttatttcttaatcaaaatgatttattaagcctaagtctaacatccaaaaaaatgcatgacatgattgcaatccctcgtctttatagcaatattcacataactaagaatcctgttttaagaacaaacaaatggtttttggacgggggaaaaacttatgtaagtggttatagatctgttctgaaaaccggtgacaagaatgacatatttttatatgatagaattgaaaggttgttggagacatcgcatttaaaatgtataaaacagctgactattgacgaggatttgtttcacaacagggaagaaggattgcaactgttacaaagattggtcaatgaaatcactgacttggacgtgattgaaagtcttgacatcaaggatcctaccttgtttgagttatgttcagcaaagtattatcgcctgtcaagtttaaagaagagagtagtatatggcgaaactggatttgatggtatcaaattatggcaaaacttcaaaagcttaaaatggcaattacctgaatcgttggatttgcaaaacgtaataatccctgaagtgggtgtaatgttaatgaagcaacttaatggaggagagttagaaataaaggacgaagcgtactcaagcctaagggtctttgaatactttgattccctgaacctccgcttcaagaatctgcgccgtttgaagcttaatcatgttcacaaacaaggtgatgggagtgctacttctatgagattatcttcacgcgcgtttaaggatgtagttaatttatccaatcttaaagcccttgaattagaattttcttgtgaggtggacgactgtgaatgtgatgatgactttcttcaagatataacaggaaaccttgtttccttaacaagtctggggttcattgaaaagacattcaccaaaaaagggtaccattacatggacgagaaatgggacttggtcgttaataagtttattttaaatttaccaaacgtgagtaaagatttgcgtttgttaagcatacgacatgacccacctttaaatggcaagggcattgatactgttgatgggaacttgcttcgccgtaaaaaactttatgaaaaggttttaccaaagctaacttcgttggaaacaataatagctccaactgtattgcagtccatcacctcatatgaaatgtatgcgtgtgaccttttgtggaacggctgcaaatgtgcgttctgctccaaatacttaccattatttgataagtacatcatgaatcatcaatacttttcgaccccggatgcaagatacttggatattataccgatagtgtttgcagcatatactggaaaatctctagctaagaggtttgatcctcagaagaactgggatttggatttactacagtatgcccctgaggatacgacgtggaatttccatggctttgagagaattcatcactttgcaagttatgaatgttattttgacgaatcctcatttgagcccttagccactattatatcgcattttttttatccttacatgaactacttgataaagatattgccaaaccttcgccaaactatgttgtcaggaatatactttagcgtgagcccagaattacacacttatgaaactatttatgattaaacttgatagttgtga

SEQ ID NO: 2264 - DNA, 350 bp, Saccharomyces cerevisiae
tacagaaagcaaaacaataataaataatggctaataaagttattcaactacagaaaatcttccaatcttccactaaacctctatggtggagacatccaaggtcagctttatacctgtatccattttatgctatttttgcggtagccgtcgttacaccacttctatacattccaaatgctattagaggtatcaaagccaagaaggcatagttaggtaaaaataacatccgttcatagcatctttataattgttctttgatattaagtgtgtatgctcaatacacatcacccaaaacatttttattcgaaataagatgaaagccatttatttatatatacatatataatatt

SEQ ID NO: 2265 - DNA, 774 bp, Saccharomyces cerevisiae
atgtttggtaaagttttcgtaagctacatcagaacaagaattgggttcaaacctttaagcacgatatacacgcctgtttcttcttcttcgctcagcttcgataaggaggcatgtttcccctttaaaaaatggcacgaactgaatatgtcccagaagcaagagtttattcagcgttttgtcaaaaactacaggcaccaatacccaagttctaagaccaatgtttcgctgaaggggctgagtattggcatggacgagcacaatgactcgccatctgtgttcggcatattttataacgatatctggaaatcgtttaagaacgagcaattaggaactaacaatgataatatgaaatcgggtagtaggttcagtcaccccagctttaaacaattgttaatacagaagtgattgcttccgtttcccaatttttcgcttccctccgccgcgcacaccgtttcttccgatcattttagatattcattcaatagttgcttatttttgggttctttagaggaaaaaattttcgattaaaattacttaatattatattgttatatatataaacttgaaagaaattacttttttttttgtattcgttttttttttttcattattcaccggaaaaggtgaaaacttattactatattgcacaccgagagaaaatcatcggaaaaatgtggccaatggattaacaatgacacatatcgccaataaaggtgactttggattgttctttctacacccgattaaccactctttctctttcaatgtattcca

SEQ ID NO: 2266 - DNA, 1602 bp, Saccharomyces cerevisiae
agtcatcagagctcaaagtttcataaaagaatataacattcaagatactttaaagggcttggcgcagtaatttttccctatcgatatccgtcaggaataccaggaaactaatagagtcatgatcaccggtaaagaattgagaatcatctctcttttgaccttagacacggtttttttcctattggaaattaccataggttatatgtcacattcattggccttgattgccgattcatttcacatgttgaatgatatcatctctcttttagtggcactatgggctgtggatgtggccaaaaacaggggtccagacgctaaatacacttatggatggaaaagagcagaaattttgggtgctttaatcaatgctgtttttcttattgccctgtgtttctctattatgattgaagctttacaaagattgattgaacctcaagaaattcaaaacccaaggttggttttatacgttggtgtagcagggttaatttctaatgtcgtaggtttatttttgttccacgatcatggcagcgatagtctgcactcacactctcatggctctgtggaaagcgggaataacgatttggacatagaatctaatgcgactcattcccactctcatgcatctcttccaaacgataatttggccatcgatgaagatgctatttcgagtcctgggccctcagggcaaattggtgaagtgttgccacaatcagtagtaaacagattatcaaacgaaagccaacccttattgaaccacgatgatcatgaccacagccatgaatcgaagaaaccaggtcatcgctctttgaatatgcatggtgtcttcttacatgtactaggtgatgctctgggtaatattggtgttattgcagctgctttgtttatttggaaaactgaatattcttggagatattactcggatccaatcgtttctttaatcatcaccattattattttctcttccgctctgcccttatcacgtagagcttcaagaattttactacaggctactccttctacaatttctgctgatcagattcaaagagagattttggcagtacctggcgtgatagcggtccatgacttccacgtctggaacttaactgaatcaatatatattgcatctatccacgttcaaatagactgtgcacctgataaattcatgagctccgccaagctgataagaaaaatattccatcaacacggtattcattctgcaactgttcaaccagaatttgtttctggagatgttaatgaggatattcgcagaagattttctatcatagcaggtggttcaccatcttcgtctcaagaagcctttgacagccatggaaacactgagcatggtagaaaaaagcgttcacctactgcctatggtgctactacagcatcatctaattgtattgtagatgacgctgtaaactgcaatacttccaattgcctgtaataaagatataaagggctgaagccgtcggtgaatttatcccatggttctacagagaacataaactatatactatttacataattaattcttagacgtataggaagaaggcagttcttcctaactcaagaactgcgttattcaatgtatgaatacgc

SEQ ID NO: 2267 - DNA, 690 bp, Saccharomyces cerevisiae
ttcattttaaacattgaggttgaagaatttggacaatcataagcatctatatagttcctcaagtcttttaaggaaaaacagtgcggaaaaatggctcactttaaagaataccaagttattggccgtcgtttgccaactgaatctgttccagaaccaaagttgttcagaatgagaatctttgcttcaaatgaagttattgccaagtctcgttactggtatttcttgcaaaagttgcacaaggttaagaaggcttctggtgaaattgtttccatcaaccaaatcaacgaagctcatccaaccaaggtcaagaacttcggtgtctgggttagatacgactccagatctggtactcacaatatgtacaaggaaatcagagacgtctccagagttgctgccgtcgaaaccttataccaagacatggctgccagacacagagctagatttagatctattcacatcttgaaggttgctgaaattgaaaagactgctgacgtcaagagacaatacgttaagcaatttttgaccaaggacttgaaattcccattgcctcacagagtccaaaaatccaccaagactttctcctacaagagaccttccactttctactgaactgtgcatatttgaattttaagatataaaatatttttctgatactttaatagtttatttttatgtattatcaattctgta

SEQ ID NO: 2268 - DNA, 1386 bp, Saccharomyces cerevisiae
tgtctttcgaaacagatttttagctatggctaccttgcacttcgttcctcagcacgaggaagaacaagtttactccatctctgggaaggcactcaagttaacaaccagtgacgatatcaaaccatacctggaagaattggcagctttgaaaacctgtaccaaattagacctttcagggaatacaatcggtactgaagcttcggaagcattagctaaatgcatcgctgaaaatacacaggtcagggaatctttggttgaagtaaattttgctgacttatacacttcgaggttggttgacgaagtcgttgattcgttgaagtttttattgcctgttctgttgaaatgtcctcacttggagattgtgaacctttctgataatgcgtttgggctaagaacaatcgagttactagaagattacattgcacatgccgtgaatatcaaacatttgatcttaagtaacaatggtatgggcccttttgctggtgaaaggattggtaaggccctatttcatctcgctcaaaataagaaagctgcttccaaaccatttttggaaacttttatctgtggtagaaatagattagagaatggatccgcagtctacttagctctgggtttgaaaagccactccgaaggtttgaaagtcgtaaagctgtaccaaaatggtattaggcctaaaggtgtcgccacgctaattcattacggtttacagtacttgaaaaacttggaaatcttggatcttcaagacaatactttcacgaaacatgcttctttgatccttgctaaggccttgcctacatggaaggatagtttatttgaattgaatttgaacgactgtcttttgaaaactgctggttcagatgaagtctttaaagtattcaccgaagttaaattccccaatttgcatgtcttgaaattcgaatataatgaaatggctcaagaaaccattgaagtatccttcttaccggctatggaaaagggaaatttacctgaattggaaaagctagaaataaatggtaacagattagatgaagattctgatgctttagatttgctccaaagcaaatttgatgatttagaggttgacgattttgaagaggtcgatagtgaagatgaggaaggcgaggacgaggaagacgaggacgaggatgaaaaactcgaagaaattgaaacggaaaggcttgaaaaggaactgctagaagtacaagtagatgatcttgctgaacgtttagctgaaactgaaatcaaatagctatgaataaaagtaaaaataaacacaatcaactgtggacgaggttcaggcaaatatcatggtgacacgcttatagatagttatcgggtaagttaaaaaaccaaatagctgatgtatgtatatgtatgcaaaagata

SEQ ID NO: 2269 - DNA, 5379 bp, Saccharomyces cerevisiae
tcagtaaggttcgtctattcatttttatttaaagctattagtatctactactacagtctgaatcaaggaccgtttaatataaaaaacacacctgtactgttgcaaaaatggtagcttccaccaaaagaaagagagatgaagattttccactttcgagggaagactccacaaagcagccctctacctcatcattagtaaggaacactgaggaagtctcttttccaaggggtggtgcgtctgctttgactcctttagaactgaaacaagttgctaacgaagctgcaagtgatgtgttatttggtaatgaaagtgtcaaagcatctgaaccagcaagtagacccttgaaaaagaagaagacaacaaagaaatccacttctaaagattccgaggcctcatcagcaaactctgatgaagctagagctggactaattgaacatgtcaactttaaaacgttgaagaatggctcttctttgcttggtcagatttctgctatcactaaacaagatttatgtataacattcacagacggaatttctggttatgtgaacctaacacatatctcagaagaatttacttcgattttggaagatctggatgaagatatggatagtgatactgatgctgctgatgagaaaaaatccaaagttgaagatgcagaatacgaatcgtccgacgacgaagatgaaaaattagataaatctaatgaattacctaatttaagaaggtactttcacattggtcaatggctaagatgctctgtcatcaagaatacctctttagaaccatcaactaagaaatccaaaaagaagagaatagagttaaccatcgaaccttcatccgtcaacatatacgcagatgaagatttggttaaatccacgtctattcaatgcgcggtcaaatccatcgaggatcacggtgctaccttagatgttggtctgccaggctttacagggttcattgctaagaaggattttggcaattttgaaaaattattgccgggggctgttttcttaggtaatatcaccaaaaaatccgacagatcaattgttgtaaatacagacttttcggacaagaaaaacaaaattactcaaatctcctcaattgatgccattatccctggtcaaatcgtcgacttattgtgtgaatcaatcactaaaaatggtattgccggtaaagtttttgggttagtatccggtgttgtcaacgtatcacatttaagaacattttccgaagaagatttaaagcataaatttgttattggttctagtattagatgccgaattattgcttgtttagaaaacaaaagcggtgacaaggtcttgattttgtcaaaccttccacacattttaaaactagaagacgctttgagatctactgaaggtcttgatgcattccctatcggctacacatttgaatcatgcagcattaaagggcgtgattccgaatatctatacttagcattggatgatgatagattaggtaaagtacattcttcaagagttggtgaaattgaaaattcagaaaatttaagttccagggtccttggttatagccctgttgatgacatttatcaattgtccactgatccaaaatacctaaaattaaagtatctaagaacaaatgatattccaatcggagaattattaccaagttgtgaaataacttccgtctctagttcaggtattgaattgaagatatttaacgggcaatttaaggcttctgttccaccattacacatttcagataccaggctagtttatccagaaaggaagttcaagataggttctaaggttaaaggtagagttatatcagttaattcaagaggtaatgtgcatgtcactttgaaaaaatcattagttaatattgaagacaacgaattaccactggtttccacttatgaaaacgccaaaaatatcaaagaaaaaaatgaaaagactttagcaactattcaagttttcaaaccaaatggttgcatcatttccttttttggtggtttatcgggatttttacctaattctgagatctcagaagtctttgtgaagagaccagaagaacatttaagactcggtcaaacagtaatagtaaaacttcttgacgtcgatgctgacaggaggagaattattgccacatgcaaagtttcaaatgaacaggctgcccaacaaaaagataccattgaaaatattgttccaggcagaacaatcattactgtccatgttatcgaaaaaaccaaagattctgttattgttgaaattcctgatgttggcttgcgtggtgtcatctacgttggtcatctctctgattccagaattgaacaaaatagggctcagttgaaaaagctcagaatcggcactgaactgactggtttggtaattgataaagatacaagaacccgcgttttcaatatgtccctcaaaagttctctgattaaagacgctaaaaaggagactcttccattaacatatgatgatgttaaggatctaaataaagatgtaccaatgcacgcttacattaaatccatttctgataagggtctctttgttgcatttaacggtaagttcattgggttggttttaccaagttacgctgttgatagtagggatattgatatcagcaaggcgttttatattaaccaatccgttaccgtctatttattaagaacagacgacaaaaaccagaaattcctattatctctaaaagctccaaaggtcaaagaagagaagaagaaagttgaatctaatatcgaagatcctgttgattcgtctatcaaaagctgggacgatttgtctattggtagtattgttaaagcaaaaatcaagagcgtcaagaaaaatcaattgaatgttattttagcggcaaatttgcatggcagagtggacattgctgaagtgtttgacacgtatgaagaaattacagataagaaacagccgttgagtaattacaaaaaagacgatgtcatcaaggtaaaaatcataggtaatcacgatgtcaagagccataagttcttgccgattacacacaaaatctcaaaggctagcgttttggaattatccatgaaaccatcagaattaaaatctaaggaagtgcacacaaaaagtcttgaggaaatcaacattgggcaagagttaactggctttgtcaacaattcatcaggtaaccacctatggctaacaatttctccagttttgaaggcgagaatttctctactagatttagctgataacgattcaaatttttcagaaaatattgaatctgttttcccattaggttcagccctccaagtgaaagttgcctctattgaccgcgagcatggctttgtcaatgccattggaaagagtcatgttgacataaatatgtccacaattaaagttggtgatgaattgccaggtcgtgttctaaaaatagctgaaaagtatgttttgttagaccttggtaacaaagtgactggtatttcctttattacggatgcgttaaatgatttctccctaacattgaaggaagcttttgaagacaaaattaacaacgtcattccaactaccgttttatctgttgatgaacagaataagaaaattgaactatcccttcgtcctgctactgcaaaaactcgttcgatcaaatctcatgaagatttgaagcaaggcgagattgtagatggtattgttaagaatgtgaatgacaaaggtatttttgtttacttgagtaggaaagttgaagcctttgtccctgttagtaaactatctgattcttacttgaaggaatggaagaagttttacaagcctatgcaatacgttttgggaaaagtcgttacatgcgatgaagattctcgtatttctctaaccctaagagaatccgaaataaatggtgatttaaaggttctaaagacctattcagacattaaggctggtgatgttttcgagggtacaattaaaagcgtcactgattttggtgttttcgtcaaactagataacactgttaatgttactggtttggcacatattactgaaattgcggacaaaaaacctgaagatctttctgccttgtttggtgttggggacagagtaaaagctattgttttgaaaacaaatccagaaaaaaaacaaatttcattgagcttgaaagcgtctcatttctctaaagaagccgaattggcttctactaccaccaccactactactgtggatcaactggaaaaggaggatgaagatgaagtcatggcagatgctggcttcaacgattccgacagcgaatctgatatcggagaccaaaacaccgaagttgccgataggaagcctgaaacatcttcggatgggctatccttgagtgctggttttgattggactgcttccattttggatcaagcgcaagaagaagaagagtctgaccaagatcaagaagactttactgaaaataagaaacacaagcacaagagaagaaaggaaaatgttgttcaggataagaccattgatatcaacactagggcaccagaatctgttgccgattttgaacgtctacttatcggtaatccaaattcgtccgtagtgtggatgaactatatggctttccaactacaactgagtgagatcgagaaggctcgagagctcgcagaacgtgcgctaaagaccatcaacttcagagaagaagccgagaagttgaatatttggattgcaatgctgaatttagaaaatacttttggtaccgaagaaactttagaagaagtgtttagcagggcttgtcagtatatggactcatatactattcatacaaaactgcttggtatttatgaaataagtgaaaagttcgacaaagcagcagaattattcaaagctacagctaagaaatttggcggcgagaaagtttctatctgggtatcgtggggtgattttttgatcagccacaatgaagagcaagaggcacgtactattttaggtaatgctttgaaggccctaccaaagcgtaatcatatcgaggttgtccgcaagtttgctcaattagaatttgcaaagggtgacccagaaaggggtcggtcattattcgaaggtttggttgctgatgcgccaaagagaattgacctgtggaacgtttacgtagaccaggaagtgaaggcaaaagataagaagaaggtggaagatttatttgagagaataataaccaaaaaaataacaaggaagcaggctaagtttttctttaataaatggttacaatttgaggaatctgaaggtgacgaaaagaccattgaatacgttaaagctaaagctactgagtatgtcgctagccatgaatctcaaaaagcagacgaataattcctgatggatttttaactgtaaagtaatataaatggctaagtttgtaaagtatatttgtaaagtacatagaatgtaaagt

SEQ ID NO: 2270 - DNA, 872 bp, Saccharomyces cerevisiae
ggaaatagaacattgagaacgtattttgataatgtcccaaggtagaaaagctgcagaaagattggctaagaagactgtcctcattacaggtgcatctgctggtattggtaaggcgaccgcattagagtacttggaggcatccaatggtgatatgaaactgatcttggctgctagaagattagaaaagctcgaggaattgaagaagaccattgatcaagagtttccaaacgcaaaagttcatgtggcccagctggatatcactcaagcagaaaaaatcaagcccttcattgaaaacttgccacaagagttcaaggatattgacattctggtgaacaatgccggaaaggctcttggcagtgaccgtgtgggccagatcgcaacggaggatatccaggacgtgtttgacaccaacgtcacggctttaatcaatatcacacaagctgtactgcccatattccaagccaagaattcaggagatattgtaaatttgggttcaatcgctggcagagacgcatacccaacaggttctatctattgtgcctctaagtttgccgtgggggcgttcactgatagtttgagaaaggagctcatcaacactaaaattagagtcattctaattgcaccagggctagtcgagactgaattttcactagttagatacagaggtaacgaggaacaagccaagaatgtttacaaggatactaccccattgatggctgatgacgtggctgatctgatcgtctatgcaacttccagaaaacaaaatactgtaattgcagacactttaatctttccaacaaaccaagcgtcacctcatcatatcttccgtggataaacctagctaaactaagtaaatctgtatactttttata

SEQ ID NO: 2271 - DNA, 439 bp, Saccharomyces cerevisiae
tcttcgccatgataactaaatacttcagtaaggtaattgtcaggtttaatccctttggcaaggaagcgaaagttgctaggttagtacttgctgccattccaccaacgcaacgaaacatgggcacgcagattcaatcggaaattatctcagattacaataaagtcaagcctcttgtgaaagtaacctacaaggacaaaaaagaaatggaagtcgatccatcaaacatgaactttcaggaattagccaatcatttcgaccgtcactcgaaacagctggatctcaaacatatgttggaaatgcattgagaaaataaaggcatctacaaatctcattgtaggcatgcacgtttctaatattctaacaaaaacaaagtcagagttcacaagcaagcctgtaaataatatatatgcaattacacaaacgtatagatagatatacc

SEQ ID NO: 2272 - DNA, 745 bp, Saccharomyces cerevisiae
gtgcaatactacaagactataagatttaatagctgtaaccatgacgaagaatgtattgatgttacatgggcttgcgcagtcaggtgactactttgcctctaagacaaaggggtttcgcgccgaaatggaaaagttaggatataaactctactatccaacagcacccaatgaatttcccccagctgatgttcctgatttcttgggtgaggtaattgctgatgcacctggggatggtgagaataccggtgtgcttgcgtggctagagaatgacccttccaccggtggctatttcataccgcagacgacaatcgactatttacacaattatgtccttgaaaatggtccatttgcaggtattgtaggatttagtcaaggagccggtgtagctggatacctagcaacggatttcaatggtttgttgggccttacaacagaagaacagccgccgctagaatttttcatggcggtcagtggtttcaggttccaaccacaacagtatcaagaacagtacgacctgcatccaatatcggtcccatctctacatgttcaaggagaacttgacactatcacagagccggccaaagtgcaaggcctatataactcttgtacggaagactctcgcactttactaatgcactctgggggccactttgtgccgaactcaagagggtttgtgagaaaagtggctcaatggctccagcagttgacctgaggcaagtatatatagcacgtaatcttcacataa

SEQ ID NO: 2273 - DNA, 1626 bp, Saccharomyces cerevisiae
taaatgattttattcctcgttaggccagtattagggcagtaaagactgtaatgaccagtacaagaacgttgagatacgcacaggttgcctgtgcttgtatctggtgtcttttttcagctggtattatctttggatttgctgctttgaaacctattttaatttcagaaggtgtataccatgaattgtgtgatcctaaggatggtgatagattattatgtactgcacaggatctgaaattaaattttatatttgctctcagtgctactgtaacaaacatcatggcccttcctgtcggtaagattttggatatgtatggacctcgtgtctgcggaataataggatcatgtctcttgttcctagcaagcggtaattttatttctgccaagcatctagtgtctctttgggacccatatcttgtcggttacacgcttttggcagttgccggtccgttcgtcttcatttcatgttttcaattggcaaatagcttcccacaaagatcaggaaccgtattggccctactaacaggatcatttgattcgtcatctgcgctgtttctgttatataggttgttatatcaaaactggtttcctaccttgaacgtttccagatttttcaccctatatttgattgttccagtgtttattcttgcctgtcaactcacgataatgcctcattcttcctacaaaactgtcaatcacattgctaagatcgctgtggaaggtttagatgaaaacggaagactcatcgagggtgatacaggctccggtatcatccctgatgaacaggaacgtcaatcgttgattgcaatcgagcgtgaagaagatagtatcccatcaaggccgcagagaaggaaatcggtattggaaacttacgttgaagataagttgcagaaaaagtcaggcggcatattcggagtcttgcatgggaaatccgcttatgaacaaataaagagtccgtggttttatttaatgcttttatttgcgcttgttgccatgctgaggataaactattttattgctaccgtcagaacacaagaagaatacttattaaatgatcctgatttagcactaaaattgaattccatttttgatatgttacttccacttggcggtgctgtttccataccatttattgggctgctcttggaccatacagatactttgtccactctcacaatattgttcaccacttctaccgctataggtgtttttggcttgattccaaattcattcacttggaacttaataggtatagtacttctggtagtgtacagaccattttattacacagttgtttctgattattcttcaaaagtttttggatttgacacatttggtactgtttatgggttattgtcctgcatttgtggtattttcaacatgagtcaaaacttactggacaaatggacacatactactttcaacatgaatccattcccaataaaccttacactggtaatcctcacagtcgttttttcactaactttaacattttacatacgatctcagattttgcccaagcccgtgaatgaaagaggattgtcctccaactaccaaactatctgagtgcacactttcaagctaacacgcactttatttatatttaaatgacataaagttatatatc

SEQ ID NO: 2274 - DNA, 2603 bp, Saccharomyces cerevisiae
tgaaagagctatagagaagtcacaggatatagagggatctatttgtagctggcaagttaatagagattggaaaactgattcaaaattgttagatcacctggcgctgagaaataattgtgttttttggtataaatagacacccccttttgaggttgaagagatagagtaaagaagaagtgtagacattaatgggttcatcaattaactatcctgggtttgtgactaaaagcgctcatttggctgacactagtacggatgcgagcatttcatgtgaggaagcaacaagctcgcaggaagcgaagaagaatttctttcaaagggattataacatgatgaagaaggcgcctgctccaacgaagtctaaactgtctttggccttgcagacttccaagtcatcctctagtgccaacggtactgtacaagaggatacttcctcgaagacagaagatttttctacaaagagcattaagaaaaaaccagatagcggcgttgaatcgcatgtgtccatccaatcggattcggggccacaatcagactcagatttggattcagattcctctatctcatcatgtgacgaaaggaacgaagagtctttgaaagattacaggccgggtgggtaccaccctgcctttaagggcgagccctataaggatgcacgctacattttagtaagaaagctgggatggggccacttctccaccgtttggttggcaaaggatatggtaaacaacactcacgttgctatgaagattgttcggggcgacaaagtttacacagaagctgctgaagacgaaattaagcttttgcaaagagtgaatgacgccgataatacaaaggaggattccatgggggctaatcatattttgaaattgctagatcatttcaaccataagggccccaatggcgtccatgtggttatggtatttgaagtcctcggcgagaacttactggctttgataaagaagtatgaacataggggcattccattgatttatgtcaagcaaatatcgaagcagttactgcttggtcttgattacatgcataggcggtgtggtattatacacacagatattaaaccagaaaacgtgttgatggagattggagatgttgagggtatcgttcaaatggtcgaggcactggataaacagaagagagaggcaaaaaggttgcagaggcacgtttcgcggtcttctgatattaccgcgaacgatagcagtgatgagaaatgggcagaatgccaaacaagtatgccctgcggctcaagctcaaattccaaatctcgttctatagagaaggacttgtcaaaaagatgctttagaagacctagacgtcatacaattatcacagggtcgcaaccattaccttccccaattagttcatcaaatttctttgaaatgagggcgcacttttgtggtagtagtcacaatagcttttcctccgtatctgggaataggaacattccatcttccatcaataataacagtattaataatggcataggcattaagaatagcaacaatagtttcttaaattcagtaccacattctgtgaccaggatgttcataaatgaagacagtaatgataacaacaataatgataatagtaaaaataaaaataacaacaataacaacagtaacaacaataataacgaggacataatgaacacacctttgcatgaagagcagctggcagactctttatctacatttgatatttccaatatatcacaaagctccgatacaaatggtccatatatttctaatactatggattcaaattcaaacgtcagtaccgatatcaactccccagaaaatttgattcagatcaagattgctgatttaggtaatgcttgttggtatgacgaacattacacgaattctatacagacaagagaatacagatcaccagaggtgttactaggcgccccttggggttgtggtgcagatatatggtctactgcttgtctaatttttgaattgattaccggagattttcttttcgaaccggacgaaggtcattcctacactaaggatgatgaccatattgcacaaatcatcgagttattgggagaattaccatcataccttttgaggaacggcaaatatacaagaactttcttcaattcaagagggcttttaagaaatatctcgaaattgaaattttggcccttagaagatgttttaactgaaaaatataagttttctaaggacgaagccaaggaaatatctgattttttgtcgcctatgttacagctagacccaaggaaaagagctgatgcaggtggcttggttaaccatccatggctcaaggataccttgggtatggaagagattcgggtacctgatagagagttgtacgggagtggttccgatatccccggatggtttgaagaagtccgcgatcataaaagacattgattacctttatacctttattttgcccttgccttttacttttttttctgtttaacctcttttttgcatactttagttctctgctcagttgtttatttttcagtagtttttttgcaatttttttttttttttttaccaaagtaaatttgtaacacctagtataatattctgaagtaacaacaaaagatt

SEQ ID NO: 2275 - DNA, 2569 bp, Saccharomyces cerevisiae
aagtattgtgagcaaccccgctattggagtagtattaattcagtggcagactgtatattgaacccagatcattcgctctattattcatctttcgttcattttcaattgttctgaaagtggtttgcgatgcagttgtctatgcggatgatgttcacaccaaaacatcagaaactggtcaatcaatgttatcctacgggaaggaccacagataagaagcctaaatcttcggaaacttcatatttgctatattacgttaactcgaggcgtagtaaattggagaaagttagcacttacctgattaagcgttccacttccgacttgaaccatcggcgcatagggaacatagccgttacattggatttaatgaacaaaattgtgttgcattgtaaggagaatttgaatgtatttgttaaagattttttgtacattatgaacaaagttctttccaacaacaattttaacaatgatgtatctgttgttgaattaatagaactggcatttagtagtatatgccagaacttggacgacgtcttgtgtaacggtgacatggaattcgtccagttataccagaactttgttgatcttttttttaaaatagttactgaaagaattcataatgatgacatgcttctgaaatgctgtattgatatatcaaacacaaatagtgtttcaagcaacccacaactaaaccactttgtttccaagtctgttgcctatactatttcaaagttccaagagagaaatccgaaatttaaaactttgtcgctggaagcagctctggagagcaatttaggaaaaaggctaagtcgaacacaaactcgtacaattgggttagataaggccgccgaagataatcatgacctttcagtaaaagcattgcaatcctattttaacacaactgagacagacaaattgaatttgtctattcgtactctgttgcgctgtctgcaaagtacacctaataaggaactgctagagtttgtatgcaatggtatacctgttcagttacgatatattgttatacttcttttggtcagacaactaagcgacaaggataaaaatgtaaatccaattgtttccttgaaattgatgtcgtcattacttgtttcagatgtcagtatagtggggttgagtgttcttgatataatgagaaagcttttaaatttccagttgaaaaatgcaactaataaagaagttgtggcacagtcttgtatcaccatgacagaccttaaccataaaacttattacgctgaacagacctcagatatgttatatgaactactattgaaattgaaaagtgacaccgtcaaggatgttgaaaagaatgcagttgtggaagatattgatttcctcgttgaacatattacgcagccaagtatcagtttggaattattcatcgacttggcgcattacatgaaaaaccacattatatgtttatttaacattgttgaaactgaggttccaagcagcattctcttttcaaaactgtactcattattacgtgaactggattcacatggtgtgcaaaaagaaatgatggaagagatctttgacaagtatggaaaaatggcactattatccggtttgaattattttctagagaacgtttctgagcctgagtatacctattattcgtaccatttacaagcagctaactttttaaaactcaatgactacaagtcacaaactgagtacaaaatgcaaactagaactttgtttaccaaggaagatttattgtcatactattctgatactggatcaaataaatacagcaagaagggggcgcagattttattgtctcgtgataatcaaatttctacttctgatttactgtcggactctcaagttcgtactacacctctggagtacaagaatgtccctaatgctattttttcaaatgggaaagcagtgtatgataacaacgattttgcggccaagcaaaataaattcgacaacagcatagatgacaatatagaagaagctaacgatactgtaatttctgatgctaatgcaaaaggtagtatctataggtttgttgctgaggacgcaagatcatggaaaacaatgagagccaccgcaccaaaagttagcgatttgaaaaaaactatgaatgaaaagaatattccaaataatatgaaaagagatggctcttttcggggttctcaatcagtgaaatctcgtgtcactaatatcacatttttattaaatgaattgaaaactttttcagatgacgcgaataaaatcaaagatcctgatgaggagaatattgttggcttggataaaatcgacgttgctagatcaaattctctgcgacttgcaccaatatctagtctttctgatcgcagtagcattggaaatagaaaatcctttttgcaaaaaacagcaactggtgaaaatcaaaacgatgactttaaagacgcaaatgaagatttacattctttaagttcaagaggtaaaattttctcctccacttgagaaattaagtttttgacggacagctgtggatgctttcaagggcaagagtgatatagcatgactttctaattaatgtaatttacgtagatataga

SEQ ID NO: 2276 - DNA, 2455 bp, Saccharomyces cerevisiae
ggtaaaaatattgatatacgaagttgaggagcgccaatggttagctcactggcatcaaatataattctagcccttgtggtagtcctgatgacactgctaaggcaaaataagccgttgcagaggtggtttgtatcatatgttgaaaagctattatcaagaaaatcaaatctggcccaaaaagtcagcgttttatcgccctccttaaaattggttgatgttgagaaatcaatatctgccgatcaatcgaatctttctaaaattaattatcagattcccactcttcctgatcttacggggaatttaatccgtttacatgagtatcgagcaagaggagaaggctataatggccttttatttcggagagcaagacaattaaatggaatttcagaagatcagttgcaaaaattaggctacttcaccaaattaatgaaaaataatgagggtatccgagaaaacgcaagagttattgacaagataattgagttcactttagggaaattgattcattccaacgaacacgatgaagaatttacagaggaaattgaaaagatatgcgcggaacacggctataagattaaagatggtcaccttattcaattgaatcctgacttcgtatttccaatagtttcgtctcgaggcagccaaagtgtggtccatgaagcattagcacatttgtgtcgtgatttcagctcttactatagtgtggaaagagatcctttacaaaattttatcattagtagaatcaaccatcatgtgattagtgccggggacatgaaagagaaaattcttatcgtgaccccaggggctggtgtgggtggcctatcccatactcttgccaccactttccccaaaatacaggtggactccatcgaattatcagccttgatgtacatatgtaacctatttgcactcgaatataagcatgacgttaagatacgtccttttgtacaacaatattcatgccagacagtgtttgataatcagttgagaagtttatcggcagatttgagcaaagttggccaccgcagtaatctggacccactatggggggacttcacacgatattctcccatttccaaagactatgataaaattatcatttgtagcgcatatttcatagataccgcggaaaatatgtttgaatatctatccagtattgaagcactaaagaaatactgtaaagagctgcattgggtcaatgtaggtccattaaagtatggcaccaaacccttggtccaatttacaggagatgaattaagtcggctgcgtaaaattcgcgggtggaaggaccttgtggaggaatatgaagttgatagctcaaagggattgaatggctatttaactgattatgagtcaatgtatcaaggatactatggtctgcttaaatttcattctgtcttcgaaagctgaattgatactacgaaaaatttttttttgtttctctttctatctttattacataaaacttcatacacagttaagattaaaaacaactaataaataatgcctatcgcaaattagcttatgaagtccatggtaaattcgtgtttcctggcaataatagatcgtcaatttgttgctttgtggtagttttattttcaaataattggaatactagggatttgattttaagatctttattcaaattttttgcgcttaacaaacagcagccagtcccacccaagtctgtttcaaatgtctcgtaactaaaatcatcttgcaatttctttttgaagctgtcaatttgctcttgagtaatgtctcttcgtaacaaagtcaaagagcaaccgccgccaccagcaccggtaagttttgtggagccaattctcaaatcatcgctcagatttttaataagttctaatccaggatgagaaacaccgattgagacaagcagtccatgatttattcttatcaattccaatagttgttcatacagttcattattagtttctacagcctcgtcatcggtgcctttacatttacttaacttagtcatgatctctaagccttgtagggcacattcacccatggcatctagaattggcttcataacttcaggaaatttctcggtgaccaacacacgaacgcgagcaacaagatcttttgtagaccttggaattctagtataggttaggatcattggaatggctgggaaatcatctaagaacttaaaattgtttgtgtttattgttccattatgtgagtctttttcaaatagcagggcattaccataagtggccacagcgttatctattcctgaaggggtaccgtgaatacacttttcacctatgaaggcccattgattcactatatgcttatcgttttctgacagcttttccaagtcattagatcctattaacccccccaagtaggccatagctaaggccagtgatacagaaatagaggcgcttgagcccaacccagcaccgatgggtaaagtagactttaaagaaaa

SEQ ID NO: 2277 - DNA, 3237 bp, Saccharomyces cerevisiae
tcatttgaacaatagaactagatttagagactagtttagcattggccaagaactaaccatacgcaatgactgttactactccttttgtgaatggtacttcttattgtaccgtcactgcatattccgttcaatcttataaagctgccatagatttttacaccaagtttttgtcattagaaaaccgctcttctccagatgaaaactccactttattgtctaacgattccatctctttgaagatccttctacgtcctgatgaaaaaatcaataaaaatgttgaggctcatttgaaggaattgaacagtattaccaagactcaagactggagatcacatgccacccaatccttggtatttaacacttccgacatcttggcagtcaaggacactctaaatgctatgaacgctcctcttcaaggctacccaacagaactatttccaatgcagttgtacactttggacccattaggtaacgttgttggtgttacttctactaagaacgcagtttcaaccaagccaactccaccaccagcaccagaagcttctgctgagtctggtctttcctctaaagttcactcttacactgatttggcttaccgtatgaaaaccaccgacacctatccatctctgccaaagccattgaacaggcctcaaaaggcaattgccgtcatgacttccggtggtgatgctccaggtatgaactctaacgttagagccatcgtgcgttccgctatcttcaaaggttgtcgtgcctttgttgtcatggaaggttatgaaggtttggttcgtggtggtccagaatacatcaaggaattccactgggaagacgtccgtggttggtctgctgaaggtggtaccaacattggtactgcccgttgtatggaattcaagaagcgcgaaggtagattattgggtgcccaacatttgattgaggccggtgtcgatgctttgatcgtttgtggtggtgacggttctttgactggtgctgatctgtttagatcagaatggccttctttgatcgaggaattgttgaaaacaaacagaatttccaacgaacaatacgaaagaatgaagcatttgaatatttgcggtactgtcggttctattgataacgatatgtccaccacggatgctactattggtgcttactctgccttggacagaatctgtaaggccatcgattacgttgaagccactgccaactctcactcaagagctttcgttgttgaagttatgggtagaaactgtggttggttagctttattagctggtatcgccacttccgctgactatatctttattccagagaagccagccacttccagcgaatggcaagatcaaatgtgtgacattgtctccaagcacagatcaaggggtaagagaaccaccattgttgttgttgcagaaggtgctatcgctgctgacttgaccccaatttctccaagcgacgtccacaaagttctagttgacagattaggtttggatacaagaattactaccttaggtcacgttcaaagaggtggtactgctgttgcttacgaccgtatcttggctactttacaaggtcttgaggccgttaatgccgttttggaatccactccagacaccccatcaccattgattgctgttaacgaaaacaaaattgttcgtaaaccattaatggaatccgtcaagttgaccaaagcagttgcagaagccattcaagctaaggatttcaagagagctatgtctttaagagacactgagttcattgaacatttaaacaatttcatggctatcaactctgctgaccacaacgaaccaaagctaccaaaggacaagagactgaagattgccattgttaatgtcggtgctccagctggtggtatcaactctgccgtctactcgatggctacttactgtatgtcccaaggtcacagaccatacgctatctacaatggttggtctggtttggcaagacatgaaagtgttcgttctttgaactggaaggatatgttgggttggcaatcccgtggtggttctgaaatcggtactaacagagtcactccagaagaagcagatctaggtatgattgcttactatttccaaaagtacgaatttgatggtttgatcatcgttggtggtttcgaagcttttgaatctttacatcaattagagagagcaagagaaagttatccagctttcagaatcccaatggtcttgataccagctactttgtctaacaatgttccaggtactgaatactctttgggttctgataccgctttgaatgctctaatggaatactgtgatgttgttaaacaatccgcttcttcaaccagaggtagagccttcgttgtcgattgtcaaggtggtaactcaggctatttggccacttacgcttctttggctgttggtgctcaagtctcttatgtcccagaagaaggtatttctttggagcaattgtccgaggatattgaatacttagctcaatcttttgaaaaggcagaaggtagaggtagatttggtaaattgattttgaagagtacaaacgcttctaaggctttatcagccactaaattggctgaagttattactgctgaagccgatggcagatttgacgctaagccagcttatccaggtcatgtacaacaaggtggtttgccatctccaattgatagaacaagagccactagaatggccattaaagctgtcggcttcatcaaagacaaccaagctgccattgctgaagctcgtgctgccgaagaaaacttcaacgctgatgacaagaccatttctgacactgctgctgtcgttggtgttaagggttcacatgtcgtttacaactccattagacaattgtatgactatgaaactgaagtttccatgagaatgccaaaggtcattcactggcaagctaccagactcattgctgaccatttggttggaagaaagagagttgattaaaagaaaatgaccttttattacactttctattattaatgtcaattaatgttaacccatgtttttcttttgtgtctataattctttttttttatctctaagcttttgaacaatgaattttttgttcctttcttttaataatacaagtactaccccatgaaaccaatattatcatgcatttttatgaatgtcaagaataaagatactgttattttttgtgtcttattttttttctctttgtttatttaaacgttttctaaaattaaaacttatgtatactggaatatgtgatata

SEQ ID NO: 2278 - DNA, 847 bp, Saccharomyces cerevisiae
accgcactctttacattgctgcatggcttactatgagttccctattaatatcatacgaatctgacttcaaaacaaccttagaacaagccaaagcgagcttagcagaggccccctcacaaccgttatcacagagaaatactacactgaagcacgtagaacagcaacaagatgagttgtttgacctgctagatcagatggatgtagaagttaataacagcataggcgatgcctcagaacgtgctacgtacaaggcgaagttaagagaatggaagaagactatacagagcgatatcaaacgaccactgcaatccttagtagactcaggcgatcgtgatagactttttggagatcttaacgcatctaatattgacgatgaccaaaggcaacagttgttgagcaaccatgcaatcttacagaaatcgggagatagactaaaagatgccagtagaatagcaaatgaaactgaaggaatagggtcacaaataatgatggatttaaggtcacagagagaaactttggaaaatgcaagacagaccttgtttcaagcggattcatatgtggataaaagtataaagacactaaaaacaatgactagaaggctagttgctaataaattcataagctatgccattatcgcagtccttatattattgattttgctagttttgttctcaaagtttaaataaggtgggaaaacaaattcaataaaaaacctctagaatctaaagaacatgtcaaggaactatagagttaccttcactagtaatatcaacgctaccttactgataaaaaactactgcaattaaatattctatagatcaaaatatagaggtatatcgttggaaat

SEQ ID NO: 2279 - DNA, 365 bp, Saccharomyces cerevisiae
atgtctaatccatgccagaaggaggcctgcgccatccaagattgccttctatcacatcagtacgatgatgctaaatgcgctaaagttatagatcagctgtacatctgctgctcaaaattttacaatgacaatggaaaagattcacggtcaccctgctgtccgctaccttcgcttcttgagttgaagatgaaacagcgaaagcttacaccaggggacagttgaggcttccaattggcccttctttctacgtatgtatgaactagcaattgaaaaaaaaaaaaaggtatgtgcgtgaagagaatctaatcataagtacattattcgtacttccagggaagatccactcactttctttatgaaaaaga

SEQ ID NO: 2280 - DNA, 1043 bp, Saccharomyces cerevisiae
ctggaatagtgtggaattgtaatactttacatttgaaaactgcccatacacgcacaaatattgcagcaatgagcaacgctaatccttatgagaataacaatccgtacgctgaaaactatgaaatgcaagaggacttgaacaatgctcctactggtcactcagatggtagcgacgatttcgtagcttttatgaacaagatcaactcaataaatgctaacttgtccaggtacgaaaacattatcaaccaaattgatgcgcaacacaaagacctacttactcaagtgagtgaggaacaggagatggaattgagacgttctttggacgattacatctctcaggccacagatttgcagtatcaattgaaagcggatatcaaagatgcccagagagacggattgcacgactctaataaacaggcacaagctgaaaattgcagacagaaattcttaaaattaattcaagactacagaattatcgattctaactacaaagaagaaagcaaagagcaggcgaagagacagtacacaattatccaaccggaagccactgacgaagaagtggaagccgccatcaacgatgtcaatggccagcagatcttttcccaagcgttgctaaacgccaatagacgtggtgaggccaagacagcattggccgaagtacaggctagacatcaagagttgttgaagttggaaaaaacaatggctgaacttacccaattgttcaatgacatggaagagttggtcatcgaacaacaagaaaatgtggatgtcattgacaaaaacgtcgaagacgctcagcaagatgtagagcaaggtgtgggtcacaccaacaaggccgttaagagtgccagaaaagcaagaaaaaacaaaataagatgtttgatcatctgctttattatctttgctattgttgttgtcgttgtggttgttccatccgttgtggaaacaagaaagtaatagagcacatgcgcctccctcccgccagccccccaattcctattatgtgtaatcaaacaatttctattaaaaccgaaaacctaaaaa

SEQ ID NO: 2281 - DNA, 2064 bp, Saccharomyces cerevisiae
tgagctatttttgagaatagcgctttactgctgcatggaggagtgattttttatagaacattgaaaaaccaaaggactggtgcctaactacaaaattttcaagagttgtttcaagttatctatattgtcattggttaataattataaaaaatcttaaagtttggagagccaaattttttttctatataaaaaagcaaatgtcattcaagtttctgatagaatcgctgcttctcggttcgataagcggacaaatacggtgtggtagatcttcggtgatcccccgtggcgatgtatcttatgggggagacgatactgacgaacttaacatggatataatgttgtttgcgtttggaaccttaatcgtggtctacatcgtcatctgtatcgtttatttttttacaaaacagatagctacgcggcttataactgcatattataatgagcatggccctggccaaagaatatctttattcagcgattatgacgaaaataatgcacacgttcatagcagaagattaatggaaaacatgagtttaaggtggcccaacaatcttgacgatgctgatgaagtaagagataagctggcacagttgtcacctgaagagcagttttattataagcaaggtgaggagtatatcaagcagaacccaccatttctgcttaaccagggacttttacaacagtccgaagatagcaatccagacaccacccgtgaagaccctattatgaacgagcaaacaaggcaatatattcaagaagagggggcttatgcatgggagtttagcccaaatcctgatatgccaaaccatactgtcatagtggaaaataaaacagaggtttcttttctaaattataattatgatgcttctatatccacaaatctacccattccgtgtataaataaagtatattattgtgaattcaagatatttgaaacggatggcccactaaacagtgatgaaaatgtatcgaaaggtgtcatctcatttggtctttccacacagccttatccatatttcaggttaccgggaagacaccaccattcgatagcatacgattctaacggcgccagaagatttaatgactccttcaaactaaatgagcaattaagaacgttatttccacagtgtgaaaagggagacattgttggcattggctataggtcacgtagtggaacagtatttttcaccaggaacggaaaaaaactaaatgaaaaatctgttggtggtcatatccgcggctggaaattccaatacctatacccgatcattggctccaacgtaccttgtcaaattcatgtgaatttcggcacttatggctttgtttatatagaagcaaacgttaaaaaatggggatacgcaaagtcaaacggcattaaattacctcctccttcttacgaagactacggtaaagataccctattagaaagcggtggtgaagacaatgatttcgacgaagatttttcagacggtgatagcgacaatattgcggctggtagtactacaaatctcaatgatgatataattataagaaacggtgaaatattaccgccaccacctggatttgaattcactatgtcccctcccactggaaagaagatcatcaatgaggaaattaatctagattccttacctatgctaccaccaagttactcggacgatgaacatcattcgaaaaatgataaatcagcaataagcggacgaattattggaacgagcagaaatttaattactgatgaagcatctttcgatagtgttgataatgataacgaagatgaaaatgatcacgagagagatcccgaacaattttcagaatttgatgattacgaaagcaggatgcatggcatataatacgaaaatgcatgagatagtaaggctgaaacactagccccggtcagttatctttttttgcgctgtattacgcagagccaccattttttaaaaacattgcaatttataacgttttcttccttattgagggtttcaacgctatcacctactcgatatcgcagtgcagcatatagatatttacatacatatatacatatgtttacgtacactagta

SEQ ID NO: 2282 - DNA, 222 bp, Saccharomyces cerevisiae
gcaaaggttgattatgtagcgatctctaacgacaattgttggaatgaaaatgaactatcatctatcaactagtagttacactaccagtatgttatcatgtacggtgttagatgatgacataaggtatgagaaactgtcatggaagttagacgaagctgaaatgcaaggattgataatgtaataacataatgacacatataaaacagagtgaagaataatcgt

SEQ ID NO: 2283 - DNA, 890 bp, Saccharomyces cerevisiae
ataaatagactacctacatgttgcgaccactgagaaaaagcgttctagcaagctgccgacattgtttcaaggtgtgcggtgggttgcctcaaaagcaattacccttattttcaccattgctcttgagagcacgatactcatcaactgatagctcaactaaaaggtctaacaaatcagataaaatagatgctccaggatttaagaaaattttccttgttgctattatcggtacagtgatatttgtcaagacagtacagtctttagataagaacaaaccgaagacaacattatcagaagaagaattcgaaaatgtggttaaagggttgaaaagacgtgtggctatcttcccacaaggtgaggtcgatataaagttttccttatcacccagcattgaagaaactagaaaggtactgcagaaatcacaaggcgatgatataaatgagctgcagtttgtcgatccagtcaaggtcatcgattactacagaaccttgagggatgatagatatgaggctttattaaatgaatactacaaaaaatacgggtgtgacacgtacgcttacaatttgccgaccggtatgttggtcatgcttttgggtagatatttcaaagagaacttcaagaccggtgacaagctagtagttgtgaactttcctcattcgattgctgatgcaacaagatttgaaaatgaggtttctatagtgtctaaaatctttgttccgaggaaattgagtggctctgacgtctgtaaatattacgaaactgtaggtaaagctgatatcatctgaggatgttttcttttttttttttttttggtttcttctccttgttaatagcttatatgtatatatatctggatatatgtcctgaatatgctgcttatctgtcatata

SEQ ID NO: 2284 - DNA, 668 bp, Saccharomyces cerevisiae
atgacggttggtacacttcccatctggtcaaaaaccttttcttatgcaattaggtcattatgcttcttgcatataatacatatgtatgcatacgaatttactgagacgaggggagaatcaatgttgccaacactgtcagcgaccaatgattatgtgcatgtcttgaaaaatttccaaaatggtagaggcataaaaatgggtgactgcatagtagcactgaaacctactgaccctaatcataggatttgcaaaagggttacgggtatgcctggtgatctcgtgctcgtggatcccagtacgatagttaattatgtcggcgatgtgcttgttgatgaggagaggtttggtacctatattaaagtccctgaaggtcatgtttgggtaaccggagataatttgtcacattcattagattcaagaacatacaatgcattacccatggggctgatcatgggcaagattgtagctgctaacaattttgacaagcccttctgggacggttcgatacgcaatatttggggtttcaaatggatcaataatacatttctagatgtgcaggctaagagcaactgattcgtttcgaaatctatatttttgtacgtaagttaagtgtataaacatatatatatatatatatatatatatatatattattttgatcttcagaa

SEQ ID NO: 2285 - DNA, 1169 bp, Saccharomyces cerevisiae
caggagagaagacaaaaagaaatagcacagacaaggaatatgaaggctatcaaattaacaggtcatgaacgtccattaactcaagtgaagtacaacaaagaaggtgatttactattttcatgttcgaaagatagctcggccagtgtttggtattcgttgaacggtgaaagattaggtactttggatggtcacaccggtaccatttggtctatcgacgtcgactgtttcaccaagtactgtgttacaggaagtgctgattacagtatcaaattatgggatgtgtcaaacgggcaatgtgttgctacatggaaatcgcctgtccccgttaaaagagttgaattttccccatgcggtaactactttctagctatcttggacaacgtcatgaaaaatccaggttccattaacatatacgaaattgaaagagattccgccactcacgaattaacaaaggtctccgaagagccaatccataaaattatcactcatgaaggtttagacgctgccaccgtggctggatggtcgactaagggcaaatacatcattgcaggccataaagacggtaagatcagcaaatacgatgtgtccaacaactacgaatacgtggattccatcgatttgcacgaaaagtccatcagtgacatgcaattttctcctgatttaacatactttattacatcatccagagatactaactcgttcttggtcgatgtatcgactctacaagttcttaagaaatacgaaacagactgtcctctaaacaccgccgtaatcaccccattgaaggaattcattattcttggtggtggtcaagaggccaaggatgtcaccaccaccagtgccaacgaaggtaagtttgaagctaggttctaccacaagatcttcgaagaagaaatcggcagagtacaaggccattttggtcccttgaacacagttgccattagcccacagggcacaagttatgcctccggtggtgaagatgggttcatacgtctacaccatttcgaaaaatcttactttgatttcaaatacgacgtggagaaggccgccgaagctaaagagcacatgcaagaagctaattaatgttaattttgatgctgatgttgatgtatagtaaacatacatatatgcatatacgcacgtatatatatataagaatatgaaaccca

SEQ ID NO: 2286 - DNA, 1782 bp, Saccharomyces cerevisiae
cactaatattcttcatatagcatcataatattgacttattagagcaaataaaaaattaaccaataataatgattagacaatcattaatgaaaacagtgtgggctaactcctccaggtttagcctacagagcaagtcggggcttgtgaaatatgccaaaaatagatcgttccatgcagcaagaaatttgctagaggacaagaaagtcattttgcaaaaagtggcgcccactactggcgttgttgcgaagcagtcctttttcaagagaactgggaaatttactttgaaggctttattgtattctgccctcgcgggtacggcttacgtttcatactcactttaccgagaagctaacccttctacccaagttcctcaatcggacacttttccaaacggttcaaagaggaagactttggtaattctgggctccggttggggttctgtgtcgcttttgaaaaatttggacaccacgttgtataatgttgttgttgtttctccaagaaattattttctttttactccgctattgccatctaccccagttggtaccatcgaattgaaatctattgttgaacctgtcaggactattgctagaagatcgcacggtgaagtccattactatgaagctgaagcgtacgacgttgatcctgaaaacaaaacaattaaggtcaaatcttccgctaagaataacgactacgacttggacttgaaatacgactatctggttgtcggtgtgggtgctcaaccaaacacttttggtactccgggagtttatgaatattcttctttcttgaaggaaatatccgacgctcaagagatcagattaaaaattatgtccagtattgagaaagctgcctccctatctccaaaagatcctgagagagcaagattgttgagctttgttgtcgttggtggtggtcccaccggtgtcgaatttgccgctgaattgagagattatgttgaccaggacttgagaaaatggatgcccgaattgagtaaagaaattaaagtcactttggtggaggctttgccaaacattttgaacatgtttgacaagtatctcgttgactatgctcaagatttattcaaagaggaaaaaatcgatttaagattgaaaacaatggttaagaaagttgacgctaccactataactgccaaaactggcgatggtgacattgaaaatataccgtatggtgtattagtttgggctacaggtaatgcgccaagagaagtgtctaagaacctaatgactaaattagaggaacaggactcaagacgtggtttgttgatagataacaaacttcaacttttgggtgctaagggatctatttttgctatcggcgattgtaccttccaccctggcttgttccctaccgctcaagttgcccaccaagaaggtgaatacttggctcagtatttcaagaaagcttataaaatcgatcaattgaactggaaaatgacccatgctaaagacgattcagaagtcgctagattaaagaaccaaatagtcaaaacgcaatcgcaaattgaagacttcaagtacaaccataagggtgctctggcttatattggttcagataaagccattgctgatcttgccgttggtgaagccaaatataggttagccggctcattcaccttcctattctggaaatctgcttatttggcaatgtgtctatcctttagaaacagagttcttgtcgctatggattgggctaaagtttatttcttgggtagagattcatctatctagtagaaatagatacaagagaataacattttta

SEQ ID NO: 2287 - DNA, 689 bp, Saccharomyces cerevisiae
caggaatcaagtaacaatggctatctccaagaatttaccaattttgaagaaccacttcagaaagcactggcaagaacgtgtcaaggttcactttgaccaagctggtaaaaaggtttctagacgtaatgctagagctgccagagccgccaagattgctccaagaccattggatttgttgagacctgttgtcagagctccaactgttaagtacaacagaaaggttagagctggtagaggtttcaccttggctgaagttaaggccgctggtttgactgctgcttacgccagaaccattggtattgctgttgaccacagacgtcaaaacagaaaccaagaaatctttgacgctaacgttcaaagattgaaggagtaccaatccaagattatcgttttcccaagagacggtaaggctccagaagctgaacaagttttgtctgctgctgccactttcccaattgctcaaccagctaccgatgttgaagctagagctgttcaagacaatggtgaatctgctttcagaaccttgagattagccagatccgaaaagaaattcagaggtatcagagaaaagagggctagagagaaggctgaagctgaagctgaaaagaagaaataaattaaatgaatctgataaatatgtttcatcttttttaatgtctttatatctggtataattttatgtacactgt

SEQ ID NO: 2288 - DNA, 1675 bp, Saccharomyces cerevisiae
tcatttcttatagggattgtagttgtttgaatttgtaggtaaatagttatatcacctactctccgttttcatatacacggaaatagcaccataatgtcgaaaaggtctatcgaggtcaacgaggaacaagatagagtggtctctgctaaaacagaatctcactctgttcctgctattcccgcctctgaagagcaagatgctcccaagaatgacctagaagaacaattgagtgatgaatttgatagtgatggtgaaattattgaaattgatggcgatgatgagattaatgacgaagatgaccttaggaaaaagcaagaagaagctgaaactttagtacaaaaggaccaatccgaaggcaacaaagaaaagatccaggagctttacttaccccatatgtctcgtccattagggccagatgaagtccttgaggctgatcccactgtttatgaaatgctacataatgtcaatatgccatggccatgcttgacattagatgtcattccagatacactaggttctgaacgtagaaactatccacagtctattttgttgaccacggctactcaatcttccaggaaaaaggagaatgaactaatggttctagcactttctaatttagcgaaaacacttttgaaagacgataatgaaggtgaagatgatgaagaggatgatgaagatgatgtggatccagtcattgagaatgaaaatataccattgagagatacaaccaatagattaaaggtttctccttttgccatttctaatcaagaggtgttaaccgctacaatgagcgaaaatggtgatgtttatatatacaatctagctccacaaagcaaagctttttccacaccaggttatcagattccgaagtctgctaagcgtcctattcacactgtaaaaaatcatgggaatgttgaaggctacgggttggattggtcaccattgatcaagactggtgcgttactatcaggtgattgctcaggacaaatatattttacccaaaggcacacatcgagatgggtgactgataaacaaccatttactgtttcaaacaataaatccatagaagatatccagtggtctcgcactgaatccaccgtttttgcaaccgcaggatgtgatggatatataaggatttgggacacaagatcaaaaaaacataaacctgctatctctgttaaagcttctaatactgacgtaaatgtcataagttggagtgataaaattggttacttgctagcaagcggtgacgataacggtacatggggagtatgggatttaagacagtttacgccaagtaatgctgacgccgtccaaccggttgctcaatatgacttccataagggagccattacttccattgcattcaacccattagatgagtctatcgttgcggtaggctcagaagataatactgtgactttgtgggatttgtctgtagaagctgacgatgaggaaattaaacaacaggccgccgaaacaaaagagctacaagaaattccaccacaattattgtttgttcactggcaaaaggaagttaaagatgtcaaatggcataagcaaatcccaggttgtttagtaagtaccggtactgacggtttgaacgtctggaaaacaatcagtgtctaaactgtataatacttggatcatatatttacacatagtagattattaa

SEQ ID NO: 2289 - DNA, 1259 bp, Saccharomyces cerevisiae
atagagtatgtagcgctctaagaatctgttaaattgaagtttgattttttgatattggaggctcctattttctagttgctttttgttttcactcgcaaaaaaaatggcaagatctttaagtcaatcactcacagcgactacccagaagctaaaaggaaagaagaatggtggaaaaggcaagaataagccctcagcaaaaattaaaaaaactcaaaaagagatgctatatggaatactgaacgaaaggaacataagacagattcagtttggactgaataaaaaattctctacttggtatgggagcgccgtttatttcgatcctgaaacaaaaaggctagggtgctccgagaccaagggtcagctttcctctgtttctaacagccaatactggctagacactcttttcgtttgtgaatactgcttcaaatacacggatgatcagacgcggtttgtaggacatgttgcaagttgtccatttcaatatcgtgttccaggcaaaataaaatacaagagtcctgaatatacaataagaagagtaaaaggatccaagtatcaactcttttgccaatgtctttgtcttttcactaagctatatctggacaataaatccatgtatttcaaagtagatcattatgaattttacatagtttatgaaactggatcaacaaagccgatgggattcttttcgaaagatttagtgtcatatcagcaaaataatctagcgtgcatcttgatatttcccccatatcaacgacgtggattaggccttttacttatcgagttttcatacaaactatcccaattagaaggtgtaatatcagggccagaagtaccgttatcaccttttggactaatcgggtacttgaaatattggtcacagatactctgttggcaccttattgaaggtgacctcgcccattatgataaagtgaccctggaggatctttccatcgtgactggaatgagagtcaatgatgttattttgaccttgaagcacttgaactgtattggggagaataaccaaatttacttgcagtcattgaatagctggttgaaactacatggaacaaaacggaattggttcaaattaaaagatgaatatttgctgatagatgactaggaatctattcaggatgtaacttaatggcatatgtatttcaggatagaatatcgctcgatgaattcctgtacagacaactacaaacggacgaattttgtctgaccaagttaagaacagagaactaatgcataaaatttgt

SEQ ID NO: 2290 - DNA, 1194 bp, Saccharomyces cerevisiae
ttattcaaaaaaagataccgctatacaactttggcctgatactatctatagacacgagtgtccatacttagcagtagatgtccggattcgcaaaactcaagtcgtggttatacaaagcttcccttttcgtttctttgatacttttgattgggttttcagttgttttacccatagattccattgcacaagcttctaaatcagaaaacaatgcctttaatacgttcattgttgtaggcgctttagttgtctttggcgttttttgtatctttattattattggaagaatgctatttcataagagttgtttaaaagatataccaagaagatatattccgatcacacctgctgatctcccgcatcgttctagtagggaagcagtactgcagaacatggaaagatctaaagaattaacaattcttctcaaaaaacctaaagaccctgttattcacgacggacttgagcccccgaggagatgtgactacccattagatgaaaagttatttccagaatacctaaactatgctgattgtataaaaagtttaacagatagactgaaataccatggattgtttctgaacaatttagatgttagaatgaatctagaagatacgtttgccgacgtggtgaactcacaatttgttaatcacaacgccaataaaattcagttagaaaaggcgaaggagtttatcgatttatatgaaacaattagattttcagggaaggacgttactagagaccagttcataaagtttgttaagttttgtctctatttcggtgaagtgtcattaacaagagacacttcatttgcaaatttacataattttagattaaatggcagttcaaataacattggaagaactgaatcaaaatattcaataaacccatttgatgaaaacgaatacgcgcaggatgatatgcattactttcccgaaccgcctacacatttggttagagaaagtagcataagtactgtcgcaaggcatgtttcatcaggtgtagatctgactaattctgaagaacatcctttggatacggattctgattgtaacgcccttcgtctcaaactttccaaagcggatagttatagaagtgtaattcgtcattagaaactctgatcaatagcatagtgtaacatagtgtagcataccattcaggttgtattatatacgcaacaacaataaaatattaatttaa

SEQ ID NO: 2291 - DNA, 747 bp, Saccharomyces cerevisiae
cattgataatttcattcactcttgagaagttagcggcaatagtaatcggcgaaagctaccgtaaagacagtcacaaattacctaccacacaagcaatgggagcctacaaatatttagaagaattagaaagaaagaagcaatctgatgttttgagattcttgcaaagagtcagggtctgggaatacagacaaaaaaatgtcattcacagagccgctagaccaactagaccagacaaggctaggagactaggctacaaagccaagcaaggtttcgttatctaccgtgtcagggttagacgcggtaacagaaagagacctgttccaaagggtgctacttacggtaagccaactaaccaaggtgtcaatgaattgaaataccaaagatccttgagagctaccgctgaagaaagagttggccgtcgtgctgctaacttgagagtcttgaactcctactgggtcaaccaagactctacttacaagtacttcgaagttatattggttgatcctcaacacaaggctatcagaagagatgctcggtacaactggatctgcaatcccgtccataagcatcgtgaagctagaggcttgactgccaccggtaagaaatccaggggtatcaacaagggacacaaattcaacaacaccaaggccggcagaagaaagacctggaaaagacaaaatactctgtcgttatggaggtatagaaaatgaaatagttagaaccgtatatagatcaataataatgcac

SEQ ID NO: 2292 - DNA, 1960 bp, Saccharomyces cerevisiae
ctagcttggacatcaaagcacatatcaccatcaaatatggccaattacacaaaaaccgcaatcctatccgtctatgacaagacaggtctacttgatttagccagaggcctcatcgagaagaacgttcgtattctcgcctccggtggtactgctcgtatgattcgtgacgctggttttccaatcgaagacgtttctgctatcacacatgccccagaaatgttgggaggtagagtgaaaactttacatcctgccgttcatggtggtatccttgctagggacatcgatagcgatgagaaagacttgaaggaacagcacattgaaaaagtcgattatgtcgtttgtaacctatacccattcaaagaaactgttgctaaggtgggtgtgactattccagaagcagtagaagaaattgatattggtggtgttactctattaagagcagctgctaagaaccatgctagagtcactattttatctgatccaaaggactactccgaatttttaagtgaattatccagtaatggtgaaatctctcaagatttgagaaacagattggcattaaaggctttcgaacacactgccgattatgatgctgcaatttcagatttcttcaggaaacaatactctgaaggtcaagctcaaattactctacgttatggtgccaatccacaccaaaagccggctcaagcttacgtcagtcaacaagacagtttacctttcaaagtcctatgtggttcaccaggttacattaatttgttggatgctctaaattcctggcccctggttaaggaattatccgcctcgttgaatttaccagcagcagcatcgttcaagcatgtatcaccagctggtgccgctgtgggtatcccattgtctgatgttgaaaagcaagtttattttgttgccgacattgaaaacttatctcccctggcatgtgcctatgctagggcccgtggtgctgatagaatgtcttcctttggtgattggattgctctttccaacatagttgatgttccaacagctaagatcatatctagagaagtttctgatggtgttattgccccaggttatgagcctgaggcgttggccattctatccaagaagaagggaggtaagtactgcatattacaaattgatccaaactatgttccagaagctgtcgaaagaagacaagtatacggtgtgactttggaacaaaagagaaacgatgccataatcaatcaatcaactttcaaagaaattgtttctcaaaataaaaatctcactgaacaagccataattgatttaacggttgccaccattgctattaaatatactcaatctaattccgtatgttatgctagaaatggtatggttgtcggattgggtgcaggtcaacaatctagaatccattgtacaagattagctggtgataaggctgataattggtggttcagacaacaccctagagttttggagattaaatgggctaaaggcgtcaagagaccagaaaaatctaatgctatcgatttattcgtaaccggccaaattccaacagaagaaccagaattgtctgaataccaatcgaagttcgaggagattccaaaaccatttactccagaagaaagaaaggaatggttgagtaaattaaccaacgtttctttgtcatcggatgcatttttcccattcccagacaatgtttacagagcagttaaatccggtgtcaaatacattgccgctccatctggttctgtcatggacaaggttgtattttcagctgccgattcattcgatttggtttacgtagagaacccaatccgtttgttccaccattagatggcatgagttcagagtcaatatgccataaatacagaaatgacggcaaatcgatgtatagtttattctttcctcctctaatgatataatcgccactgacacttttatatatatactaatgatacgatatgttataagtacaatt

SEQ ID NO: 2293 - DNA, 1122 bp, Saccharomyces cerevisiae
tataacacactaaagtaaataaagtgaaaaatggcatctaacgaagttttagttttgagaggtaccttggaaggtcacaacggttgggtcacatctttggctacttctgctggtcaaccaaacctattgttgtccgcttcccgtgataagactttgatctcctggaagttgactggtgacgaccaaaagtttggtgtcccagttagatctttcaagggtcacagtcacattgtccaagactgtactttgactgctgacggtgcttacgctttgtctgcttcttgggacaagaccttgagattatgggatgttgccaccggtgaaacctaccaaagattcgtcggtcacaagtccgatgttatgtccgttgacattgacaagaaggcttccatgattatctctggttcccgtgacaagaccatcaaggtctggaccatcaaaggtcaatgtttggccactttgttgggtcacaatgactgggtttcccaagtcagagttgttccaaacgaaaaagctgatgatgactctgtcaccatcatttctgccggtaacgacaaaatggttaaggcttggaacttaaaccaattccaaattgaagctgacttcatcggtcacaactccaacatcaacactttgactgcttccccagacggaactttgattgcttccgctggtaaggacggtgaaattatgttgtggaacttggctgctaagaaggctatgtacactttgtctgcccaagatgaagttttctctttggctttctctccaaacagatactggttggctgctgccactgctaccggtattaaggtcttttctttggacccacaatacttggtcgatgacttgagaccagaatttgctggttacagcaaggccgctgaaccacatgctgtttctttggcttggtctgctgacggtcaaactttgtttgccggttacaccgacaacgtcattagagtttggcaagttatgactgctaactaagaatatgtataaagttcatttgttcttttatgtatcttctagttattggtcatgtttaaaatggtaaaaataaagaaaataatttctatattttagtgtataatataatcgtcatagatttcgaagtaatga

SEQ ID NO: 2294 - DNA, 841 bp, Saccharomyces cerevisiae
cctataaataatatatataacacaagaaatatggtaaccaggacgtagccaccgtatgagaagctttgaaacatccagtgataaaaaaatcttgactttatttatatatatgtatattggacattttaaaaacttgatttaagtcgctcattgcggcggcttttatattttgaaagtaatcgaatgagtacgaaaatctgacttggacagtatgcaggccctcatcttagcggttttttgacccagtcgttagatctgctaattcgattcaaatcttctcatcaagccagaggcgcgcttattagaaggacgctatcaaatccaaatgaacaacgatgcaggttctcaatacgaagagtgaaacgaaacaagaaaacgaaacaatgcagccaccatatatacaagaacgtcttaagtcattaaatgatatagagacccagttatgctccatgttgcaggaggcgtctcaagtcacgttcatatttggtgaactaaaaagaggtaatgaatcagtgaaaccccaattcgaaaatcatgtcaaacagttttacgaacgactagataaatcaaccacacagctacgcaaggagatacagttgttggatgagaacgttggaacacgactactgcccatcaatgtcaacaagaaggccctaggccaagacacagaaaaaatggaagaacaattggatttattgtcggctatattagatccttcgaaatccaagtaaaccttaattaggactagaacacttttgtatcaagtacaaatgtataattatataaacatcacagggatatcatattccatatgatgatatagcatttactttacttcaac

SEQ ID NO: 2295 - DNA, 1763 bp, Saccharomyces cerevisiae
taaaaccatagccatagtaatttatcaccaacatgtcaaacgacggctcaaaaatattgaattataccccagtgtctaaaatagatgaaatagttgaaatctcaagaaatttcttctttgagaaacaattgaaattgtcccacgaaaataacccaaggaaaaaagatctagaattcaggcagttgcagttgaaaaaactctattatgccgtcaaagatcatgaggaagaactgatcgatgctatgtacaaggactttcatcggaacaaaattgaatcggttctgaatgaaacgaccaaacttatgaacgatatacttcacctaattgagattttaccaaaattgatcaaacctcggagagtatctgattcttctcctccatttatgtttggtaaaacaatcgtggagaaaatatcaaggggcagtgtcttgattattgctcctttcaattttcccctacttttagcatttgccccattggcagcagctcttgctgcaggtaacaccattgttctgaagccaagtgaactaacaccacacactgctgtagttatggaaaatttgttaaccacagctggtttccctgatggattgattcaagtagttcagggagctatagatgaaactacaagactactagattgtggaaaatttgacctaatattctacacaggttctccccgtgtcggatcaatagttgctgagaaagcagcaaaaagtctaacaccttgtgtacttgaacttggtggtaaatcacctacctttattacagaaaatttcaaagcaagtaacataaaaattgctttgaaaaggattttttttggtgctttcggaaattctggccagatttgtgtttcaccagattatttgttagtacataaatctatctatccaaaagtcattaaagagtgtgaatcagtactaaatgaattttatccaagctttgatgaacaaacagatttcactcgtatgattcatgagcctgcttacaaaaaggccgttgcaagtataaactcaactaacggctccaagattgtgccttcaaaaatttctatcaattcagatactgaggatctatgccttgtaccaccaaccatagtttataacattggttgggatgatcctttgatgaaacaggaaaactttgctcctgtattgcccatcattgagtacgaggatcttgatgagaccattaacaagataatagaagaacatgacactccattggtgcaatacatattctctgatagccaaactgaaataaatcgtatcttgacgcgcttaagatctggtgactgtgttgtcggtgatacagtgattcatgtaggaattaccgacgctccatttggagggatcggtacttcaggttatggtaactatggtggatattatggattcaatacctttagtcatgaaagaacaatttttaaacaaccatattggaatgattttaccctttttatgagataccctccaaatagcgcacaaaaggaaaagctcgtccgttttgcgatggaaagaaaaccttggtttgacagaaatggcaataacaagtgggggttacgccaatatttttcattatctgccgccgttattttaattagtaccatttacgctcattgttcttcctgaacgtaatgtttaaggttaattaattatttgatgtataagtaacctttcgtttaaaaatttcatatgggcgataatatatcaatatttattaattacaatttactctatttgctcgtatagagtatatactcg

SEQ ID NO: 2296 - DNA, 1896 bp, Saccharomyces cerevisiae
taataagaagaagatcaaccaatctttctcagtaaaaaaagtaacaaaagttaacataacatgtcatttcaaattgaaacggttcccaccaaaccatatgaagaccaaaagcctggtacctctggtttgcgtaagaagacaaaggtgtttaaagacgaacctaactacacagaaaatttcattcaatcgatcatggaagctattccagagggttctaaaggtgccactcttgttgtcggtggtgatgggcgttactacaatgatgtcattcttcataagattgccgctatcggtgctgccaacggtattaaaaagttagttattggccagcatggtcttctgtctacgccagccgcttctcacatcatgagaacctacgaggaaaaatgtactggtggtattatcttaaccgcctcacataatccaggtggtccagaaaatgacatgggtattaagtataacttatccaatgggggtcctgctcctgaatccgtcacaaatgctatttgggagatttccaaaaagcttaccagctataagattatcaaagacttcccagaactagacttgggtacgataggcaagaacaagaaatacggtccattactcgttgacattatcgatattacaaaagattatgtcaacttcttgaaggaaatcttcgatttcgacttaatcaagaaattcatcgataatcaacgttctactaagaattggaagttactgtttgacagtatgaacggtgtaactggaccatacggtaaggctattttcgttgatgaatttggtttaccggcggatgaggttttacaaaactggcatccttctccggattttggtggtatgcatccagatccaaacttaacttatgccagttcgttagtgaaaagagtagatcgtgaaaagattgagtttggtgctgcatccgatggtgatggtgatagaaatatgatttacggttacggcccatctttcgtttctccaggtgactccgtcgcaattattgccgaatatgcagctgaaatcccatatttcgccaagcaaggtatatatggtctggcccgttcattccctacctcaggagccatagaccgtgttgccaaggcccatggtctaaactgttatgaggtcccaactggctggaaatttttctgtgctttgttcgacgctaaaaaattatctatttgtggtgaagaatcgtttggtactggttccaaccacgtaagggaaaaggacggtgtttgggccattatggcgtggttgaacatcttggccatttacaacaagcatcatccggagaacgaagcttctattaagacgatacagaatgaattctgggcaaagtacggccgtactttcttcactcgttatgattttgaaaaagttgaaacagaaaaagctaacaagattgtcgatcaattgagagcatatgttaccaaatcgggtgttgttaattccgccttcccagccgatgagtctcttaaggtcaccgattgtggtgatttttcatacacagatttggacggttctgtttctgaccatcaaggtttatatgtcaagctttccaatggtgcaagattcgttctaagattgtcaggtacaggttcttcaggtgctaccattagattgtacattgaaaaatactgcgatgataaatcacaataccaaaagacagctgaagaatacttgaagccaattattaactcggtcatcaagttcttgaactttaaacaagttttaggaactgaagaaccaacggttcgtacttaaaacgaatgatttactaatggcttaatgattttcacctttttcaatgaatattaacggtaaagaagaaaatttcaattttttgaacacatactttatatacttaatagatccatatttcgacatatt

SEQ ID NO: 2297 - DNA, 985 bp, Saccharomyces cerevisiae
caagaaagattaaaacacaaagccatgcctatcaaagaaactgataaagaagttgttttgactcatccagctgatgagaccaccagcgttcatattctaaagtacggtgctacagtttattcttggaaattgaaatctgaagaacagttgtggttgtctactgctgctaaattggatggtagcaaacctgtgagaggtggtatacctttggtctttcctgtattcgggaaaaatagcaccgatgaacatttgagtaaattacctcaacatggtcttgcaagaaattctacttgggagtttttgggtcaaactaaggaaaacccaccgaccgtacaatttggcttgaaaccagaaattgctaacccagaattgaccaaattgtggccaatggattatcttttgattttgactgttgaattaggctccgattatttgaaaactgccatagaagtagaaaacacatctagttccaaggaattaaagttcaactggttgttccatacatacttccgtatcgaagatattgaaggaacaatggtctctaatttagctggcatgaaactttatgaccaactgttgaaggaatcctacgtcgacaagcacccagtcgttaccttcaatcaagaaaccgatgtaatttatcagaatgtcagcgccgaacgggccattcaaatagttgacaagggcgttcaaattcacactctaaaaagatacaacttgcccgacactgttgtttggaatccatggattgagaagtctcaagggatggccgatttcgaaccaaaaactggttaccaacaaatgatatgtattgaacctggtcatgttcatgattttatttccttggctcctggtaaaaaatggaatgcttatcaattactttgcaaagaagaattgaaatatcaagctattcaataaataatataaaaaaatgtagcaacggtaatttttataaagtaaattcccagttgtatacttttcttaa

SEQ ID NO: 2298 - DNA, 1988 bp, Saccharomyces cerevisiae
cagcactattctgccttttgcaactcgcaaatacagtttttaaggtatattaacgggcaaaagtagcaaagtaaacaaaaataatgtcatctatctctttgaaggaaattataccacctcagccttcgacacagcgtaactttactacgcatttatcgtatgaccctacaaccaacgcaattgcttacccatgtggaaaatctgcatttgtacgttgtttggacgatggagacagtaaagtacctccagtagtacaatttactggtcatggctcttcggtagtcacaacggtaaagttctctccaattaagggttcccagtacctatgctccggtgacgaatctggaaaagtgattgtttggggatggacatttgacaaagaaagcaattctgttgaagtgaatgttaagtctgaattccaagttttagcaggtccaatcagcgatatctcctgggattttgaagggcgaagactctgcgttgtgggagaaggtcgtgataactttggtgttttcatatcctgggattctggtaattccttaggtgaagtttcaggtcactcacaacgcatcaatgcttgtcatttgaagcaatctagacctatgagatctatgacagttggagatgatggatctgttgtcttttatcaaggacctccatttaagttctctgccagtgacagaacacaccacaaacaaggctcatttgtcagggatgttgaattttcacctgacagcggtgaatttgttattacggtagggtctgacagaaagatttcttgctttgatggcaaatcaggtgagtttcttaaatacatagaggatgatcaagaaccagttcaaggtggtatatttgcactatcgtggcttgattcccaaaagtttgctaccgtaggagcagacgctaccattagggtttgggacgtcacgacttcaaaatgcgttcaaaaatggaccttagacaagcaacaactgggaaatcaacaagttggtgttgttgcaacaggaaacggaaggattatttctctttcactggatgggaccttaaacttctatgaacttggacatgacgaggttttaaaaaccattagtggtcataacaagggtattactgctttgacagtcaacccactaatcagtgggtcatatgatggtaggattatggaatggtctagctcttccatgcaccaagatcactccaacttgattgtatcattggataatagtaaagcgcaagaatactccagtatttcttgggatgatactttgaaagtgaacggtattactaagcatgaatttggatcgcaaccaaaggttgctagtgcgaacaatgatggcttcactgcagtactaacaaatgatgatgatttgttgatattacagtcttttacgggcgatataatcaagagtgtaagactgaactcaccaggctctgccgttagcttgagccaaaattacgttgcagttggtttggaagaaggtaatactattcaggtattcaaattatcagatttggaagtcagttttgatttaaaaacacctcttcgcgcaaaaccctcgtacatatcaatttcgccatctgaaacatacatcgctgctggagatgttatgggcaagatattgctatatgatttacaatcaagagaagtgaaaacttcaagatgggctttccacaccagtaaaatcaacgccatttcatggaaacctgctgaaaagggagcaaacgaagaggaaattgaagaggacttagttgccactggttctttagacaccaatatttttatttactccgtcaaaagacctatgaaaatcattaaggcgttgaatgctcacaaggacggtgttaacaaccttttatgggaaacaccatctaccttggttagttctggtgcggacgcttgcattaaaaggtggaatgttgtcctcgagtgagataagaatataaagtaaacaattacgtaaccttagaaaaatagatataaaaaagtt

SEQ ID NO: 2299 - DNA, 1391 bp, Saccharomyces cerevisiae
tacttttgaagaaggaaataccatctagcagaaatgtcagattcagagggaggtctagcttccgaagttgaacatgagaagcggtcaagatctactagcaacagacccaattatgcaattgatactgaggatttagatattgatgaaaatgatgagaatgaagatgatgattacagagaagaagaagccaatgagggagtgaatgaagaagaaataagtgatgaggaggaacagataaataaaagcggaagaaacaaaaggaggcacgtggacgaagaagaggatttgtcagaggataaaggcgttactagatctagaaaccgttcaaagttcaaaaaaccagtatttcccggaatcgatgatgctgaggagaacttaaatcctttgaaagtggtcaatgaagaatatgttctaccagatgatcctgaaggtgagacgaagataactgcagatggtgatctattaggaggcagagaatttttagtgcgcaccttcacattaactgagaaggggaatcgaaagtttatgctggccaccgaaccggctaggatagtgggttttagagattcatatttattttttcaaactcaccccaacctttataagttcattctgaatcaaactcaaaagaacgacttgatagaccgtggcgttttaccttattcatatagaaatagacaaatcgctctagtcaccgctagaggcgtgtttaaagaatttggtgctaaaatcattcgtggcggcaaacatataaccgatgattattatgcttctgaattaagaacaaagggaaatgtaattgaaggaaaacttgctggtgatcctattgataaatccgcaagggccttagaaaccatgatgtatcctgcttccgagaatggcataaaccctgcaaaaaaccaggtggaattctttgaacacaggccacatggtcacatgagtaattctaatattattgcatcaggtagtaagctgagctctacaaattggctctatcagcattctgctgcgtgtagtagatttaatagcgatttgttttatgatagagtgaaggttcttcttgtagatcaacaaggcttgagagatgcatacacaaatatattacacataccagaatccacacagtcaaccactgttttaggatggaggagatcaaaaaacgatagtcccagcgacacaagcattgtgtatgagaccgttatacacgataacgatttgaataaaccgaaaacgggactgtcggaaatcccgaaagagatctatgaagacgttgttgatgaagacgttttaagggctatcaccgaacaacaaaatttcgaaaaatgcaacgaatatatttagtatactcaatgtaacaatataacaaatttttatcttcaaatcaaggtaaa

SEQ ID NO: 2300 - DNA, 2776 bp, Saccharomyces cerevisiae
acgatctctaacttttgccactatagttttaaaggaaagattttgagctgccaacgaatacaatatagcacactcaagagtcttggcaagcaactttaaagttagaaagagtactaatgttgctactttcttggtcaagaattgctactaaggtagttagaaggcccgttcgcttccggtcctattacggcttgacccatatcaagagtttacatactcaatatcggctactcaataggctgcaagagaataagagcggtaacaagaacgaggacaataacgaagacgctaaacttaacaaagaaattcccacagacgaagaggttgaagcaataagaaaacaagtagaaaaatatatcgaacaaactaaaaataatactataccggctaactggaaagaacagaaacgcaaaattgatgaaagtattaggcgtttagaagatgctgtattgaaacaagaatctaacagaattcaagaagaaagaaaggaaaaagaggaggaaaatggtccttcaaaagccaagtcaaacagaacaaaagagcagggctactttgaaggtaacaatagcagaaatattccaccgccaccaccacctcctcccccaaaaccacctctaaatgatcctagtaatcctgtatcgaaaaatgttaacttattccagataggactaacttttttcctcctttcgtttttattggatctcctcaacagtttggaagagcaaagtgagataacgtggcaggattttagagagaaactattggcaaaaggttatgttgcgaagttgattgttgtcaacaagtccatggtgaaagtgatgttaaatgacaacggaaaaaaccaagccgacaattacggtcgcaacttctattatttcacaattggttcaattgatagcttcgaacacaaacttcagaaagcacaggacgaactggacattgataaggatttcagaatacctgtactatatgttcaagaaggcaattgggctaaagctatgttccaaattttgccaactgttttaatgattgcaggtattatttggttgacaagaagatcggcacaagcagcgggcggtagccgtggaggcatatttggtctgagtcgttctaaggctaaaaaatttaacactgaaacagacgttaagatcaagttcaaggacgttgccggatgcgatgaggctaaggaagaaattatggagtttgttagcttcttgaaagaaccttctcgttatgaaaaaatgggagctaaaattcctagaggtgcgattctatctggtccaccaggtaccggtaaaactttgcttgcaaaggcaacagcaggtgaagccggtgttccgttttattttgtttctggttcagaatttgtagaaatgtttgttggtgttggtgcagcaagagtaagagatttgttcaaaactgcaagagaaaatgcaccctcaattgtgtttattgacgaaattgatgctataggaaaagcaagacaaaagggtaatttttcaggtgccaatgatgagagagagaacacgctaaatcaaatgttagtagaaatggatggtttcactccagctgaccacgttgttgttttagctggtaccaatagacccgatattctcgataaagcattattaaggcctggtagatttgacaggcatatcaatatcgacaagcccgaacttgagggtagaaaagccatttttgctgttcatttacatcatttgaaacttgccggggaaatttttgatttgaaaaatagattagcggctttgacgccaggcttttctggtgctgatattgccaacgtttgtaacgaggccgccttgattgctgctagaagtgatgaagatgcagtaaaattgaatcattttgaacaagctatcgaaagagtcatcggtggagtggaacgcaaatccaagctactctctcccgaagagaagaaagtagtggcttaccacgaggctggtcatgctgtatgtggatggtacttaaaatacgcagatcctcttctgaaagtcagtattattccacgtggccagggcgcccttggttatgcacagtatttgccaggtgatatcttcttactaactgaacagcaacttaaggacagaatgaccatgtctctgggtggaagagtttctgaagaattacatttcccatcagttacaagtggcgcatctgatgacttcaaaaaagttactagcatggccacggcaatggtcacagaattaggcatgagtgataaaattggctgggtcaattaccagaagagagatgatagcgatttgacaaaaccattttcggacgagacaggtgacattattgattccgaagtatacagaatcgtccaagaatgccatgacagatgtacaaagctgcttaaagaaaaagcagaagatgtagagaagattgctcaagtactactgaaaaaagaagttttgacaagagaagatatgattgatttacttggtaagcgccctttcccagaaaggaatgatgcttttgataagtacttgaacgattacgaaacggaaaaaatcaggaaggaagaagaaaaaaacgaaaaacgtaatgagcctaagccatctacaaactgattgatatttcacaatacaaagaaatggaggaagactgttctacatatcttgcttattttattgaaagccagacatctttctttttcggtagaacactgtcacgtatttaccatataatctaatctgaaaacatgtaaatatatatacgtgtataaatgcacctatatctatatatgatcaaa

SEQ ID NO: 2301 - DNA, 1857 bp, Saccharomyces cerevisiae
gaattattttgttttttgtctcctctttgttcttcactaagctcagagccctagttgttgagggaacaagaagaatgcaaacactagacgagacttcaaatctactccctccacctgaggaagctgaagcccctcccttggaacaaaaatttcatgaatataatttggccttacctaagtttcccattttgttttcgctatggttgggtagttttttgagttccttggatagcactattgtcgcaaatataatgaatagagttgctgaggaattctctgaatcaagtaaaaagcaatggattgcgacgagttttcttttgacaaatacggctttccaaccactatatgggaagctttctgatataacagggcggaagtcagcattattaaccgctcaatttttttttggccttgggtgcttattaacatgttttgccagaaacgtcacggaattctcaatagcaagagccatatgtggtattggtgcaggaggattgaatgctattagtagcattgctgttagtgacatatgtacagcaagagaaaggggcgtttaccagggatatgcgaatattgttttcgggtttggtcaattactaggtgctccgttgggtggtgtatttatagaaaccattggatggagggctctttttggtatccaagtacccgtgataatgttgtgctcggtattagcaatcaaaaacattaatattaagctattccatgttcctcctatgaaagaaagatataccttaaagaatctgtcacggatagatatatttggctcattaagcctggtggcgaccattagtggagttttatttttgtgctctagccagttgaacaagttgtatttagcattgtttaccattggtagctttattgtttttatcctggttgaacgttattacgcgactgagaaaattttaccattcgaactattgactcgctcattctgtttgagctcagcggtaacggttatatcttcatttgttgtatttggtgaaatctttaggtcaccaatctatttacaattgcttcaaaatattagtgtaacaaagactggcctctttttgattttcccctctatatcagttgcagtcggatcattggtaacaggatgggtattgcggaatacgaaaattaacctagcacactgtgcatatcaaatcatttttggtggtatgataatgcagctattgggtttgggattgggctatttcctactttcacacttgaatcctgactacaccatatatgatatgcttgagtctattacattcagatctaactcaatatggtggaaattgatatatgtgtttgcatcagtccttgtgtcctttggttacgcttgtctattagtggccacgttagtaagcatcgtattcaccgtcgaaaaatcacagcaaggaaccatgactggtgttttctatttgtggagatccattggtaacgttcttggtgcctctttaactttagtgtcctatgagaatagcctgtcgtccatgttatggaattatatgttcaaaaccaagcgtgatgacgaatatcacttcaccaaaaagcagtactactcccttatcaatgattcgagttacttgagagggcccaattttccaacggatatatttgttcgcattcttgatgtctacaaaaaggcattcctgatttcctatattccaaatatagccctggcagcagtgggaattgttttatcgttatatctggtgaaacatacttacaaacgtagttcaagttcttgaaaaattgaaaatagactttatattatatacctttataaatccaaggtcaaaatccttctaggaatgagcaattctattgcatctttttctacat

SEQ ID NO: 2302 - DNA, 3384 bp, Saccharomyces cerevisiae
tgaagatttcatcaggaaagaaggaagggcagcaagaccgaatatactttttatattacatcaatcattgtcattatcaaatggtcggttccggttctcacactccttatgatatatcaaactctccatctgatgtaaatgtccaacccgcaacacaactaaattccaccttggtggaggatgacgatgtagataatcagctatttgaagaggctcaagtcactgagactggattccgttcgccttcagcttcagacaattcatgtgcgtattgtggtatagattctgcaaagtgtgtcatcaaatgtaattcatgtaagaaatggttttgtaacactaaaaacggtacaagcagctcccacattgttaatcacttagttttatcccaccataacgtagtttctttacatccagattctgacttaggggataccgttttggaatgttataactgtggacgtaagaacgtgtttttattgggatttgtttccgctaaaagtgaggccgtggttgttttactttgtagaataccttgtgcccagacgaaaaatgcgaactgggatactgatcaatggcaaccattaattgaagacagacaacttttatcatgggtcgcagagcaaccaactgaagaagaaaaattgaaagctcgtttaatcactcctagccaaatttccaagttggaggcaaaatggagatccaataaagacgctacaattaatgatattgacgccccagaggaacaggaagcaatcccacctttactattgagatatcaagacgcctacgaataccaaagatcttacgggcctttaatcaaattggaggccgactatgataaacaactcaaggaatctcaagctttagaacatatttctgtttcatggtccttagctttaaataataggcatttagcatctttcactttatctactttcgaatctaacgagttgaaagttgccatcggtgatgaaatgatactatggtactctggcatgcaacatcctgattgggaaggtcgtggttacattgttcggttaccaaatagcttccaggacacattcacattagagttaaaaccaagtaaaacgccacctccaacacatttgaccactggttttactgctgagttcatctggaaaggtacctcttatgacaggatgcaagacgcattgaaaaaatttgccattgataaaaaatctatttcaggttatttgtactataaaattttaggccatcaagtggttgacatttcatttgatgtcccattacctaaggagttttcaattccgaattttgcacaattaaactcatcccagtcgaacgctgttagtcatgtattacaacgtccgttatctttaattcaaggcccaccaggcactggtaaaacagttacttcagcaacgattgtgtatcacctttccaaaatacacaaggatagaatattggtgtgtgccccatcaaacgttgctgtagatcatttggctgccaaattacgtgacttgggtttaaaagttgttagacttaccgcgaaaagtagagaagatgtggagagttccgtctccaacttagcattgcataatttggttggccgtggtgctaaaggggaattaaaaaacctattaaagttaaaggatgaagttggcgaattatctgcttctgatacaaaacggtttgttaaattagtaaggaaaacagaagcagaaattctcaataaggcagatgtcgtatgttgcacatgtgttggtgctggtgataagcgcttagacactaaatttaggactgtgttaattgatgaaagtactcaagcttctgagccggaatgtttaatcccaatcgttaaaggtgcgaaacaagttatacttgttggtgatcaccagcaactgggcccagtcatattggaacgaaaggcggcagacgctggtttgaaacaatctctctttgaaagattaatctctctaggccacgtaccgattcgtttggaagttcaataccgtatgaatccttatttgagtgagtttccaagtaacatgttttatgaaggcagcctacaaaatggtgtaacgattgaacagcgtaccgttcccaacagcaaattcccatggccaattcgcggtataccaatgatgttttgggccaattacggtagagaggagatttctgctaacggtacttccttcttaaacagaattgaagccatgaattgtgaacgaatcatcactaaacttttcagagacggtgtcaagcccgagcaaattggtgttatcacaccatatgagggacaaagagcttatattttacaatatatgcaaatgaatggttcattggataaggatttgtatatcaaagtggaagttgcctcagttgatgcattccaaggtcgtgaaaaggattacataatcttatcgtgtgttcgtgccaatgaacaacaggccattggtttcttacgtgatcctcgtcgtctaaacgtgggtctaacccgtgccaaatatggtctagttattcttggtaatcctagatctttggcaagaaacacattatggaaccatctgttaatccacttcagagagaagggttgtttagtcgaaggtacgttggataacttacagttatgcactgttcaattagttcgtcctcagccaagaaagactgaacggccaatgaacgctcaatttaacgtagaatctgaaatgggtgactttccgaagttccaggattttgatgcacagagtatggtgtcattcagtggtcaaattggggactttggtaatgcatttgttgacaacacagaactttcttcttacatcaataatgaatattggaattttgagaattttaaaagtgctttttctcaaaagcaaaatcgcaatgaaattgacgatagaaatttgtaccaggaggaggcttctcatttgaactctaacttcgcgagagagttacagagagaagaacaaaagcatgaattgtcaaaagacttcagcaatttgggaatataattcggtgaaccctgttaaaataaaatgttaaacttggcttgtgatacaaaacggctcaaccgtgaaatgagcgctgcaaaattattcgagatagactcgcaatttgcacaattgtaacctgaaaaactttttttacttttccggaggtgcatctatcattacagtatgtgataaaggggcatggacttgatatcctagcctactaatctctttgctaaaacatgttgcaaccaaatagggctaccattgtacttctaatgaatactctttacggcgcactgcaatgcgtaataaagttttattgtagcgaggtttcatttttgcttatgttctttttattgtttaatacgtgcatatgtattctataagataaatgtatataactgcc

SEQ ID NO: 2303 - DNA, 495 bp, Saccharomyces cerevisiae
tcagatatggacccagagttacaagctattagggaagccagattggctcagttgaaaaacaacagtgggggtaccaacggcgatagaaatagcggtgctaataatggtggaggtgaaaattccgctcccgttggtgcagctattgcaaatttcttggagccacaagctttagaaagattatctcgagtggccttggtccgtagagacagggcccaagcagtagagacatacttaaagaaactgattgctacaaacaacgtcactcataaaatcactgaagctgaaattgtttcaatcttgaatggtatcgccaagcaacaaaattcacaaaataacagtaagattatcttcgaacggaaagatttcagcgaagatctgaattcatttgacaagcagaatgctaaaaatgatgacgacgaagatgatgacgacttctttgattagtttatataaacgaataatatgttttttcgtataatgttacatttagtacaa

SEQ ID NO: 2304 - DNA, 1401 bp, Saccharomyces cerevisiae
atgagtagtgacggcatgaacagagatgtttcaaactcgaaaccaaatgtcagattcgctgctcctcagcgactaagcgttgctcatcctgccatatcatccccgctgcatatgcccatgtcgaagtcgtcaagaaagcctcttgtaagaaccaaaataagactagatcctgggcacagtgctctggactggcactctctaacctccaatccagcgaattattatacaaaattcgtttcgctacagcttatccaggatttactcgatgatccggtatttcaaaaagataacttcaagttttcaccttcacaactgaagaaccaattgcttgtccaaaagatacccctttataaaataatgccacccttaagaataaacagaaaaatcgtaaagaagcattgtaaaggtgaggacgagttatggtgcgttataaacggcaaagtctatgacatttctagttatttgaagttccatccaggtggtacggacatcttaataaagcaccgtaatagtgacgatttgattacatattttaataagtatcatcaatgggttaactatgaaaaattattacaggtttgtttcattggcgttgtatgcgaataaaggttaccagagataaaaaaaaagtttgaagacttacataggatataaaaacactacacacttgcttggttaagttaaatttatttatttgtttggataggaacggaaagaataaaggcataaaaaacattgtgagagtaccgcggtctagttgagagggtagcgagcattatattcttggatagcttttttgtactcttgtatgtatttgtccttaatgctttgatccaaggattgccatttatctccgataattttcattagatccaattgagacttgtcaggatgttgtgcaaaaacttgcgaacgaacttcattggcatacttaatgaagggtcctgctggtttctttggaggaagtttttcgtcaaactccttcttcgccttttggtattcagaatacaacttttttctttcagaaatgtatttttcctttatatcagcctctaaattttgccacttttcaccggcaatcttgctgatttcagcaggacgtaaggttggattttccttaacgaattgacttctgtggtcttgcaaatataagaaataagcagatgtgggccttttaggaccctgttttatcaattcatttctaagctgcgttctcttggaagccttcaacaaggtgctagccaaattgaaaaggggcttagaagattcgtggaaagatctagttaataggctgtaactgttcatttatttgttgttgtaattgattggcttctttgttaatctgtttacttgtttatcctagtttggatgaggatccctttcttgctacgttgtttcaca

SEQ ID NO: 2305 - DNA, 597 bp, Saccharomyces cerevisiae
ccaggagaagagcaataacaactaaaatatactagttttcaataatggctttaagtttaggacagttcatcaatgtgggtggtatggtgaaggatttgaaaagtttcaactttagcgtatatggtagatggtttggatatatcaacataatcttgtgtattgcactcgggatagcgaatctgttccacgttagtggggtgatagcttttggtatcattagtataatccaagggttagtgatcctattcattgaaataccatttttgttgaaaatctgtccccttagcgataatttcattgaattcatcaagagatttgaaacaaatggatggagatgtcttttctatctagcaatggcgataatccagtatatttccattgcagtgatggctacgagtctaattgtggtagctgtcgggctaacgatatcgtcaatcagttatgcggtagcatatactaaacaccaagagttccagaatacgaacattatcaaaaatcctacagatgacgatttccctcacgaggccgttgttagagagatgttgtaatcagttccgtaccatacataaactatatgtatataatgtatatatgcat

SEQ ID NO: 2306 - DNA, 1276 bp, Saccharomyces cerevisiae
aagcgcacaatacaatgcctatggttaccgtgaagtataacttccaacttttcaaatgtaaagtttcgttgaattcaacactaaacgatgtgttacaccaatccatacaattctttcaactgcacacctcgtcaaacgactggtcattgatacatttggataaaccggtgccattagatttgccatggaggcttctaaacttaccaacgggtgtcaacttagaattatctaaaagtagtaattttccggtggcgaataagaccaaccgcgaagatattccattcaatacgatcaaaatacggtttcaaatcccaggaagagattccgtggttaaagaaatgccatctgaccaaccaattgcccctatcttgcgacagatgagcggcgctgcgggagatgattttaagatccaggtcttttccaagataatagagttcaaaacaattaaggatgagaatttgactctcgaaaatttagggattcaggagccttcgtcagttagattgatttttaataatacatctcattctgagggcattagcgctaatagcgctattcacccaaaacaaactccccctacgatgacgaacccggaaacggttgcttcactaccacctcacgaactacataaaccttctgtgtttttgccctcggatgagccattagcagttatcaaggatcaaatcgaggatgaagaagattatgaattgacagtagaacaagccaagaaataccaaaaaatgttatcatcgaaggctggtactttgggtggtcctattttgacaaagagacttagagagcaatcagccaacaacttgccaaagaaaaataaggctatatctgagtgtttgctgagagtcaagttccccgatagaagccatattcaaatagcattcaaacccaatgaagacatgcgtacagtttataacgtcgtgtcgcagttcctgatcgatgagaacatgccttttacgttaaaccaatctcatcctttcaaacccttggctaaagacgataagaagctactggatgacctggaatttggctctaaaacaatgctgctttttgaaacaaattcaaattctaatggcccattaataaaggctcatcttttggaagacgcacaaaaaatcacacacgaaacgaggacaaccccatcagttaatacgataaataaatccaatccacagggcccttctgataacgctacaagtatcaaaaagactttaaatagagtacctaaatggatgaaattaagtaaaaaataaatacaaagcta

SEQ ID NO: 2307 - DNA, 1411 bp, Saccharomyces cerevisiae
aagaagtccaaaattcaacatagcatgagaatatcatcaacattgcttcaacgctcgaagcagcttatagataagtatgcattatacgtgcccaagacgggctcttttcctaaaggatttgaagtaggctacactgcatctggagtcaaaaaaaacgggagcctggacctgggtgtaatcttgaataccaataaatctcgtccttcaaccgcagcagctgttttcacgaccaataaattcaaagctgcgccagttttgacatcgaaaaaagtccttgaaactgctcgtggtaaaaacatcaacgctattgtagtcaattccggttgtgctaactcggtcacaggtgatcttggtatgaaagatgcccaagtaatgattgatttggttaacgataaaattggtcaaaaaaattctaccctagtcatgtctacaggcgttattggacaacgactacagatggacaagatcagcactggtatcaataaaatttttggagaagaaaagttcggcagtgattttaactcttggttgaacgtagccaaatcaatctgtactactgatactttcccaaaattagttacatctagattcaaattacctagtggtactgagtatactttgacaggtatggcaaagggcgcgggtatgatttgtccgaatatggctaccttattaggtttcatagttacagatcttcctattgaaagcaaggcgttgcagaagatgctgactttcgctactacccgttcatttaattgtatatcggtggacggtgatatgagcaccaatgacacaatttgcatgttggccaacggtgctattgacaccaaagaaattaacgaagactctaaagattttgaacaagtaaaattgcaggtcacagaatttgctcagcgcttggcccagttagtcgttcgcgatggtgaaggttcgacaaagtttgttactgttaacgttaaaaatgctttgcattttgaagacgccaaaataattgctgaatcaatctcaaactctatgttggtcaaaaccgcactatatgggcaagatgccaattggggaagaatattgtgcgcgatcgggtatgcaaagctgaatgacttaaaatctctagatgtcaacaaaattaatgttagctttattgctaccgacaattcagaacctcgtgagctgaagcttgtcgctaatggtgtgccacaattggagatcgatgaaacaagggcttctgaaatattggctttgaatgatttggaagtgtctgtcgacttgggaaccggtgatcaggcagcacaattttggacttgtgatttatcacatgaatatgtaacaattaacggtgattaccgttcataaattcatgtatattttgttcaatctttcttttataagcatggttatataaacgcacagaaac

SEQ ID NO: 2308 - DNA, 1115 bp, Saccharomyces cerevisiae
aagctaaacattgaaaaaaaaaaaaaaaaaaatgataataatagtaataatagtaacgacgtaaaggtaaaagaaacaacagacttttaaacttgttaacttttgcatgacctcaattgaagatctgatatcaaatcctcccctgctactgcattcctcactctctcaacttcgctacctcatactcagtgaagggcttcccatatctgaagataaacagcagcagcgcacgcgatgttacgtgtggacggtgctctctcaaacttctatggaggcgtctacacaacggtaccttgcgctcttgaaactgggcccaccttccacaaccatttaccaaaaaatcaagaacgacacatccagaacttttcagacggatccaaactttagaaatagagtctcagaggatgccctcatccggtgtctgtcgtgctttgcttggcaaacacaacaaagaagacaaaagactcgttttggtcgcattcctgtgagcacatatgtgcagggcatgaacgtgttattagctcctctgctttactcatgtccttctgaacctatggcgtatcaacttttcactaagctttgttatgaaatgataccgacgtatctaactaagaacctaaacggcgcccagaacggcgccaaactactagatatttctctcagaatcattgatccaaagctgagtaaatttctatcggacaatttacttacagcagagatttatggtatgccttccatactcacgttatccagctgcaataaaccgcttgatcaggtcattaaactgtgggatttcatgtttgcatatggattccatatgaatattctctttgtggtggcattcctagttaaaatgagatccaaggttttcaaatcggattcccctgttaatttactacgacagtttccggattttgatgctgacgagatcattcggctgggcgtcgggttcatcgctaagatccctgctcaaatttatgacctattggtagaccacttgaccgacccagacatatatataccgtaaactatgtgaagaaatattatattttatcgtttaattctacaacgtttatatgtctgtatgtgtaaaaaaaaataaaacgaaaaaagca

SEQ ID NO: 2309 - DNA, 2493 bp, Saccharomyces cerevisiae
gtactgtattaaatctgttctaacataactaggtcaatgatggctaagaacaacaaaactaccgaggcaaagatgtcgaaaaagagagcagctagcgaagaatctgatgtcgaggaagatgaggacaagcttttatccgttgacggtttgatcgatgcggaagcaagtgagagtgacgaggatgatgacgaatacgagtctgccgttgaagaaaaggaatcatcttctgataaagaagcccaagatgattctgatgatgactccgatgctgaattaaacaaactgcttgccgaagaagaaggtgatggggaagaggactatgacagttctgagttttcagacgacacaacttccttaacagacagattatcgggtgtgaaattgcaaacgatcgttgatccgaatatttactcaaaatatgcagatggcagtgatagaattatcaaacctgaaattaatccagtttatgatagcgatgatagtgatgccgaaacgcaaaataccattggtaatattccactttctgcatacgatgaaatgccacacattggatacgatatcaacggtaaaaggattatgagacctgccaagggttctgctttagatcaactgttggattctatcgagctacctgaaggctggactggtttactggacaagaattccggttcaagtttgaacttaaccaaagaggaattagaacttatttccaaaatccaaaggaacgaacaaactgatgatagcataaatccatacgaaccgttaatcgattggttcacgagacacgaagaagtgatgccattaactgctgttccggagccaaaaagaagatttgttccatccaaaaacgaagccaagagagttatgaaaattgtaagagctatcagagagggccgtattattcctcctaaaaaattaaaggaaatgaaagaaaaggaaaaaattgaaaactatcaatacgatttatggggtgattctacggaaacaaatgatcatgtaatgcatctaagggcaccaaaattacctccaccaactaatgaagagagttataatccaccagaagagtatcttttgtctcctgaagaaaaggaggcctgggaaaatactgaatatagtgaaagagaaagaaacttcatacctcaaaagtattctgccttaagaaaggtccctggttacggtgaatctattagggaaagatttgaaagatctttggatttatatttagctcctcgtgtccgtaaaaacaaattgaatattgatcctaattctctaattccagaacttccctctcccaaggatttaagacccttccctattcgttgctcaacaatatacgctggtcacaaaggaaaagtacgcacattatccattgatccttctggattatggctagcaacaggatctgatgacggaacagtcagggtatgggaaattttaactggtagagaagtttatagaactactttaatcgatgacgaggaaaacccagattaccacattgaatgcattgaatggaatcctgatgctaataatggtattctcgccgttgctgttggtgaaaacattcatttaatagtaccaccaatattcggctacgatattgaaaataacggcaaaactaagattgaagatggttttggctacgatacttttgggactgttaaaaaatctaacctagaagtgaacgagaatggtgatggcgatgaagatggagagaatgaatctgctaagaatgctgtaaaaaaacaagtagcccaatggaacaagccttctcaaaagcaactagaaaaggatatttgtatcactatttcttgcaaaaaaacagtaaaaaagctttcatggcatagaaaaggtgattactttgtcactgttcaacctgactctggtaacacttctgttttgattcaccaagtttccaagcatttaacccaatccccattcaaaaaatcgaagggcattattatggatgcgaagttccatccttttaaacctcaattatttgtctgttcccaaagatatgtcagaatttatgatttatctcaacaaatattggtcaagaaactgttgcctggtgcccgttggttatcgaaaatcgatattcacccaaggggtgataatttaattgcgtcatcgtttgacaagagagttttatggcacgacctggatttggctagcacaccttacaagacactaagatatcatgaaaaagccgtcagaagtgtgaatttccacaaaaagttacctctattcagctctgccgctgatgacggtaccatacatgttttccatgccactgtttatgatgacatgatgaaaaatccgatgattgtgccactaaagaaactaaccggtcataaagtaatcaatagtctgggtgttcttgatgctatttggcatccgagggaagcttggctgttttctgccggtgctgataatacggctcgcttatggaccacctagataaataatttgaagtagatattgtataataac

SEQ ID NO: 2310 - DNA, 3487 bp, Saccharomyces cerevisiae
tatcagcattgcatagagatcccggcaactgagaggcaccattcagcttcgaagatttcttttttaaaacattattatgtttggagttagccgtggcgcattccccagcgcaacaacacagccatttggctcaacaggatcaacctttggtggccaacagcaacaacaacaaccagtagcaaacacttctgctttcggcctcagtcagcaaacaaatacaacacaagcacctgcgtttggtaactttggtaaccaaacttctaattctcccttcggaatgtcaggctcgactacagcaaatggtactccttttggtcaaagtcaattgacgaacaacaatgcctctggctcgatcttcggtggaatgggtaataacacagcactttctgctggttccgcttctgttgtgcccaattctactgcaggtacaagcattaaaccttttactacattcgaagagaaggatccaaccacaggtgtcatcaacgtcttccaaagtatcacctgtatgcctgaatacagaaatttttcttttgaagaattgagatttcaagattaccaagctggtagaaaattcggtaccagtcaaaatggcactggtactacttttaacaatcctcaaggaactaccaatactggatttggaattatgggtaataataactccactacttctgctacaacaggaggattatttggtcaaaagccagcaacaggcatgtttggaaccggaactggaagtggtggtggctttggctctggagcgaccaactctacaggattgtttggaagctctactaacctctcaggaaattctgcatttggagcaaataaacctgccacttccgggggattgtttggtaatacaactaacaacccaacaaacggcactaataatacaggccttttcggccagcagaactcaaatacaaacggaggattatttggtcaacagcaaaattcatttggggcgaataatgtcagtaacgggggagcctttggtcaggtgaatcgtggtgcctttccccaacaacaaacacaacaaggtagtggtggtatatttggtcaatcaaacgctaacgcaaatggtggcgctttcggccaacagcaaggcactggtgctctttttggagctaaacctgcttctggtggactatttggacaatctgctggttcaaaagcattcggaatgaataccaaccccactggtaccactggtggcttatttgggcaaaccaatcagcagcaaagtggaggagggttatttggccagcaacaaaattccaacgctggaggattgttcggtcagaataaccaaagccagaaccaatccggattatttggacaacaaaactcctcaaacgcatttggccagccacagcaacaaggcggattatttggaagcaaacctgcaggaggactgtttggacaacagcagggagcatccacttttgcgtctggtaatgcccaaaataattctatatttgggcaaaataaccaacaacagcaatcaaccgggggattattcggacaacaaaacaaccagtcgcagtcccaacctggtggattgtttggccagaccaatcaaaataataatcagccatttggccaaaatgggttacaacaaccacaacagaataatagtctttttggagcgaaaccaactggttttggaaatacaagcttattctctaacagcacaacaaatcaaagtaacggtataagtggaaataatttgcagcagcaatcaggaggtttgttccaaaataaacagcaacctgcttcgggtggcctgtttggttcaaaaccatcaaacactgttggaggcggattatttggaaacaatcaagttgcaaatcaaaacaatcctgcctcaactagcggcggattatttggtagcaaacctgctacaggatcccttttcggaggtactaattccacggctccaaacgcctcttcgggtggaatatttgggtccaataatgcatctaacacggcggccaccaccaattctactggtttatttggtaataaaccagttggtgcgggagcttctacaagtgctggaggactatttggaaacaataacaactcgtctctaaacaattccaacggttcaacgggcctgtttggtagtaataacacctctcaatctactaatgctggaggcttatttcagaataacactagtacgaacacttcgggcggagggttattttcccaaccttcccagtcaatggcacaatcacaaaatgcgctccaacaacagcagcagcaacaacgattacaaattcagaataacaatccctacggtactaatgagcttttttcgaaagcaactgtcaccaacacggtttcctatccaattcaaccaagcgctacaaagatcaaagccgatgaacgcaaaaaagccagtttgacgaacgcatacaaaatgattcctaaaactttatttacagccaagctcaagactaataattccgtcatggataaggcccagatcaaggttgatccaaagttgtcgatttccattgataaaaagaataatcagattgcgatttctaaccagcaggaggaaaatttggacgaaagcatattaaaagcttctgagttattattcaatcccgataaaaggtcattcaagaatctaattaataacaggaaaatgttgatcgcatccgaggaaaagaataacggatcacagaacaacgatatgaattttaaaagtaaaagtgaagaacaagaaacgatcttgggaaagccaaagatggatgaaaaagaaactgctaatgggggggaaagaatggttttgtcctcaaagaacgatggggaagatagcgcaacgaaacatcattcccggaatatggacgaagaaaataaagaaaatgtcgccgatttacagaagcaagaatattcagaagatgataaaaaggctgtttttgcggacgttgcggaaaaagatgcctccttcattaatgagaactactatatctcaccatccctggacacattatcctcttattctctcttgcaactgcgcaaagttcctcatttagttgtgggtcataaaagttatggtaaaattgaatttcttgaacctgttgacctcgctggaattcctttgacctcattagggggcgtaatcattacttttgaaccaaaaacctgtataatatatgcgaacttaccaaacagaccgaagagaggggagggcattaatgttcgggccaggattacctgctttaactgttatcctgtagacaaatctaccagaaaacctataaaggatccaaatcatcaactggttaaaaggcatatcgaacgcttaaagaaaaatccaaattctaagttcgaaagctatgatgcagacagtggtacatacgtgtttatcgtaaaccacgctgcagagcagacctgagttattatataacgaaactatatatagaatcaaatacaaatttgtaatgcatttagtgtaattaacctg

SEQ ID NO: 2311 - DNA, 882 bp, Saccharomyces cerevisiae
caaggcagaaacccattcgatcagcacaaaaatgaccacgaacgatacatacgaggctacttatgccattcccatgcactgtgaaaattgcgtgaatgatataaaggcatgcctaaaaaatgtcccaggaatcaattcattgaatttcgatatagagcaacaaataatgagcgtggaaagctcagtagccccttcaaccatcatcaacaccttgcgaaactgtggtaaagacgccatcataagaggcgccgggaagccgaattcttccgcggtcgctatcttagagacctttcaaaaatatactatagaccagaaaaaggacaccgccgtgaggggcctagcaagaatcgttcaggttggagagaataagactctttttgacatcactgtaaatggcgtcccagaggcgggaaattaccacgccagcattcacgagaaaggcgacgtctccaagggcgtggaatctactggtaaagtttggcacaagttcgacgaacccattgaatgcttcaacgagagtgatttgggcaagaacttgtacagtgggaagacctttctgagcgctcccttgccaacatggcaacttatcggccgcagctttgtcatttccaagtctctgaaccacccagaaaacgagccttcctccgttaaggactactcatttctgggagtcattgcgagaagcgctggtgtgtgggaaaataataaacaagtgtgtgcgtgtaccggaaagactgtttgggaagagagaaaagatgccttggccaacaacatcaaatagaacatccaagatagcacaacgtagcgtaatacagatataacataatatagtatactacatcataaccacgtgatgccggacatgtacatacgcatgtggca

SEQ ID NO: 2312 - DNA, 2696 bp, Saccharomyces cerevisiae
atgtctttaatttcagctgtagaagatagagacatacataatataggaaagacttctggtggagggagcaggacttcgtctataacttcgtcgaaaaagtcgctgaaacacggctctaaatctttgagaaaaccaaaggtataccagacaacaggcgaaccattaagcagggaggctttatataaggcgaagttgaagtacggggtttaccagtcacctgcccaaagttactcaattggcgtcagcgacgctcatgcagcttccgacaaggcagctaatttagctcatgacaatcaaaccacggtagaagcttacaaacgtatgtttattgaccctaatgccactaaagctgcatccaaaatgggacccaaagttgtacgtaacaactcaataacttctgctacttctaaaacttcaaaagaatctcagacgaagagaaagtccaaagaatctccaggggccgccgcatcgaaagcttattcgatgacaatggaaactacaagtttaagctctcaaacaaacagcaggtcatattctatcacctctgccagctctgtgttaagcggcgcgagtggcagtttcaacagtactgttaatcctaaaccaaagactttgaatttggagaaagtcttagtgggtgctgaaaaaaaggcagaatctcgtattaaggaaagatgggaaccggaaaagacgaacttccaatacggcgtcaagactgatgagcatggtaatttaaatcaattcagtttctccaatgagatgatgaataacattatggcgaaagttgatgctccaaaagcacaagatttacaaaaggtcaaaaaagtttctgctgagaaagaagccaagtcgatgaaatttgcattaggagctgctaatgctgtgaaagacatgcatcctggtgaggatatcgacaaaagtatagctcttaaggcgcagaagagggaaacctatctgagccaattaacttctcagcaagttttgactttggcaagagccaatgttgacagacaattggatatcattgaaaaaagcgatatgcatagaaagctattcactaatatggaatacaacaaagctgctgtcgctgtcgcacagtctaatcatcagaaaaagacagaattccataacaagattaacatgggtggtggcctgtttttgtcaccagaagatatcactaaaatcgcatccggattgatttctcctgtacttggtgaagtgagtgagagggcggaggcgcaacgtgctatggatgaagaaattgcagaaagaactgaggcctataataaatcatcaaatgaatgggaaacgatggaacgttctatcatttctaatgacgccaaagtattgactactacggctaataggcatcaaaccgaaaaaaagacctcccaggaaaagattaaagccagctttgatgcacttgtggccagaatggataccaaagtcgctgaaagggaaactctgcttgaagataccaagagcaaagagatcgaatttaaaaagcaaatgcagcaagagttaaaggacgaaaaagctcgtctagatcaagatttggaggaatggggtaagaaatgtgaacaagatatcactgaagcgcgcaaagagcaagaagaactattgaaaccttaccatgacgatctggcaaatgcagaagcggaacacaaaactttagtggaagagcgcgatgaaattaacgcagaaatctcaagattgcaggatgctatagttgaccataaaagaaagatctctggttacggaaatgatcttgacgcccagaagaatagaaatatcagagaggatgacaaattactggaactaggtcaaactaaagaaagcttggaatcccatttgaatgatgacgttattattcttgctaataaggctaaagagcaggctgagttatcaaccaaggaggcccgtctgaagcaattggaagtggattcgttgattaacgaacgtaagagcgagttgaacgcgaccgaaatcgagttaaagaaggaaaaactaaatttgttggaagctatgaaagatgttgcttctgcacgtggcgatgataagattgacgaagagaaggttaaaaaattgattggtatgacttctgaggagtatttaacacaaaacaaatccgtcgagaaaaatgttgaagatttaccaacccaacttgaaaaaatagaggaaggtgatgaactaaagaaggaagagatagtgggagccgaaacgaaaaattcaggtggtgatggggttccggtgagtactgccgcaaaagaagctaccgaaactagttctgctgttcaaacaaaggaacctgaagaaaaaatttcgatcggaaataaatcaagtggaaaagaagacgctaatgattgtaaatcagcggagcattcaaaagaaatctcggtttcacagaaagcaggaaacaataaatcattgggagttagccctgatagtttggaacatacatttagtggcttttcacagggttcttcgatcgaagacgatcaggatgcaattagtaatcaagagaaaaaataattgctagtgagcctagataacgaagaaatggtgcggctaagatattgaacagttgagtgggatactacagaattttgataattaagatagttctcatctgcgctttaattattctttttatgtgtataatatatgtttattgccttaatttaaatttaatattt

SEQ ID NO: 2313 - DNA, 1363 bp, Saccharomyces cerevisiae
tgcttaccgcagaatcacattaggtagagaaacggttttgcatgaaggctccagaagaagcaagggaataagcagggaaaataaagcaaaggaaaggaaggtagtcgtcaagtgatgagcttttattcaaacctaccgtctgcaggacaatctagtcgagggtcttcaacaagcggtcgaaatggggtgggattagaaccattgtatccgactatctttgagataatgtcatcacaagaaatcgattcgttactgcccgcatccatccgttatctactggcaaatcatttagtggcgaacttccctaacaggtatactttgcggctgaacaagtacttttttgagtggtttcaagcgataaaagggtttgttgaatggtatcatctaaagacatacaattctacgtttattgatcggttttatggattgcaactatttagttcgagggacagaaatcttgccttaacacaatgtttaaatccaaagggccagagtgaatggccccaaggtttgcagctgaatcaacagcaaaagagtgttatttttttggaaaaaattattctcccctatatcacagcgaagttggatgaaatattagagaaaatatcaatgaataatatattcagcagcgatgaaactgaaaataaatggcccaagagagcgtttctaagaatttatccatttattaagaaattattagcgttatccaatttactcgttaaattattatttttaactaaaagaacagggtcggtttccttgttgcaatacttattcaagatagagtacacaacggtaagaccactatcgtcagaactctctggtctcaaagagacgaaagggatggataataggctaaggaaaacaaatatatcgtcaattttcgcgctaatgcaaggacaattatcgattatacccagatttttaacatttatgggttcgcaattcttccccacttttatatttgtcctaagagtgtaccaatggtggaccacacaagacatgactactaaattgcagaaaagggtcaatgacttggatgaagatattccaaggccgcctttctcctcacatagtgacaaaacggaagataaagagggagtttctgaggcctgtcccgtttgcgaaaaaactgtacaaaacccctgtgtattggaaacaggatacgtggcatgctacccgtgtgccataagctatttggttaataatgaaggccattgtcccgttaccaataaaaagctgctgggttgtacatacaacaaacacacgaataaatgggaagttgtgacaggtattaggaagctactaatctgatgacggaggaagtgaagaaaataattctgtgtaatatatatattctagt

SEQ ID NO: 2314 - DNA, 1935 bp, Saccharomyces cerevisiae
tatacgcaagcagggaatcttgttggaagaaaaaaattatatataagctaattgtctattgttccaaatatcttattcttactcatttctttcttgttatattgtttccttaatttttatcacaataaacaaaacatcacattttgctattccaatagacaataaataccttttaacaaaatgagttctgtcgcagaaaatataatacaacatgccactcataattctacgctacaccaattggctaaagaccagccctctgtaggcgtcactactgccttcagtatcctggatacacttaagtctatgtcatatttgaaaatatttgctactttaatctgtattcttttggtttgggaccaagttgcatatcaaatcaagaaaggttccatcgcaggtccaaagtttaagttctggcccatcatcggtccatttttggaatccttagatccaaagtttgaagaatataaggctaagtgggcatccggtccactttcatgtgtttctattttccataaatttgttgttatcgcatctactagagacttggcaagaaagatcttgcaatcttccaaattcgtcaaaccttgcgttgtcgatgttgctgtgaagatcttaagaccttgcaattgggtttttttggacggtaaagctcatactgattacagaaaatcattaaacggtcttttcactaaacaagctttggctcaatacttaccttcattggaacaaatcatggataagtacatggataagtttgttcgtttatctaaggagaataactacgagccccaggtctttttccatgaaatgagagaaattctttgcgccttatcattgaactctttctgtggtaactatattaccgaagatcaagtcagaaagattgctgatgattactatttggttacagcagcattggaattagtcaacttcccaattattatcccttacactaaaacatggtatggtaagaaaactgcagacatggccatgaagattttcgaaaactgtgctcaaatggctaaggatcatattgctgcaggtggtaagccagtttgtgttatggatgcttggtgtaagttgatgcacgatgcaaagaatagtaacgatgatgattctagaatctaccacagagagtttactaacaaggaaatctccgaagctgttttcactttcttatttgcttctcaagatgcctcttcttctttagcttgttggttgttccaaattgttgctgaccgtccagatgtcttagctaagatcagagaagaacaattggctgttcgtaacaatgacatgtctaccgaattgaacttggatttgattgagaaaatgaagtacaccaatatggtcataaaagaaactttgcgttacagacctcctgtcttgatggttccatatgttgttaagaagaatttcccagtttcccctaactataccgcaccaaagggcgctatgttaattccaaccttatacccagctttacatgatcctgaagtttacgaaaatcctgatgagttcatccctgaaagatgggtagaaggctctaaggctagtgaagcaaagaagaattggttggtttttggttgtggtccacacgtttgcttaggtcaaacatatgtcatgattaccttcgccgctttgttgggtaaatttgcactatatactgatttccatcatacagtgactccattaagtgaaaaaatcaaggttttcgctacaattttcccaaaagatgatttgttactgactttcaaaaagagagacccaattactggagaagtcttcgaataatggggaaaaacagaactttgtccagacaataaatcatatttacttcattaagggttggcgttttgaatacttttattttcttccctttctcttcatttcaaatataactattatatagcaatcatatttattatttag

SEQ ID NO: 2315 - DNA, 1844 bp, Saccharomyces cerevisiae
gtattctatgaaagatagagtttgtagtaagccaaatattagaatttagctagtaaatcagactcctttcgaggcaataaactgtcgttattctgttcattgcctatatggtcgctataatacctcatgcttcctttaccacaattaaactaacccagaaaactgagggaagccaaatgccaactgaggagatctgcaaaatcaatatgaggactcgtaaatttgatgtgggcgggaattctcgagattttgagtgcttttattcgaattttgttcaaactgttatattgttgggcacttttttttactgtgttgaaaggcttcagccgtggtccattgttaccgctgatatatcttataaacaaatctttgtaaatgtctttgtggtgtgtttgataatggttggtctgatattcacaaaatattggcaacatggttacaaaagcctacccaagttcgataccatttacagtttatatttaccgtttatggtttcgttgttgttcgatacatcatctacggtgataaatactattttgatcctttcggtattaaattcatatagatggcgaactcagttggtagtgatcattttacagctctgcctcatattttttaattttgaggctggtgacaggttaaagaatattattagcatagtaataaattctttactgtcgttaattttgaagtatattgggcaattgaaaagtttagataatatcgactctaatctttttagtatcctattaaccaatattctgtacgtttcagaggctggcacagtacattttagaattttgaagggcattatccttgctctcacaacaataatttcaattaactatgtgctcaaaaaggtaatgcactttaaaccgtttatgctgtcaatatcctttgccatcgggcttccactttttgccaataccttcattcatttagaagacggtgaaaatccgctactttggctggtaaaatatatcttagagtctactattcgtcaaaagattttgtttgcttggtcttcaattcttatactgtccataccaagtatattgatcgagaaggacagtctatcgttgaacacctcccgaaaattgtggcatttcatcattttcttactcataataccgtcattccaaatggattcaaactttgtgaaaattgcattgtccggaacaataccagtcttcttatcaattgagtacataagatttcaaaacctaccgccgttaggatctgctattgaattacaactaagaaggtttgctgatgatagggaccacagcgggccattgatcatatcatacctttatttactcttcggaatatcaacacctttattaatgaataactctccaatgggtctaataggattgggaattggtgattccttagcatctattattggtaaaaggtatggccgcattcgttggaaaggtacacaaaaaactttagagggaactcttgcgtttatagtaacgagttttatcgtttgtttggtattgttacgttttgataaagctgcaatttttaaccacctaactactttacaattgcttaccctttgtacactgagtggagtgctagaaggtaatagtgtgcttaatgacaatattttgatacctgcatttatgatgatttgtgaaaaattaattactctttgacaaagtcaattattttcaacttttaaaattacataactaattgtttgcatttatgaatagaataaagaaaagaatagagcagtaaagaaaaaaaaataattgtaagtatttttttttcgttttatatctagtacttacacgtagtatatacaagtatgggctatagatataaagaaa

SEQ ID NO: 2316 - DNA, 2447 bp, Saccharomyces cerevisiae
gtctcctatttttgcttagaagatgacttggttactttattttcttctaactgcttaggtaaactacatcatctaatatataaagacgcttccaccacatttaaccaacggaaacgtctcttcgctgtaaggttctacatttattaggttatactaactaatcaattcttcgttcttttcttaacatttctctcttttttcgttcatataacgtaaattacacgaagctatccatcctaagggcaaacgggaaagaaaataaaacaaaaccatgaagttgcagagtttgttggtttctgctgcagttttgacttctctaacagagaacgttaacgcttggtcaccaaataacagttacgtccctgcgaacgtaacctgtgatgatgatattaacttagtcagagaagcatctggtttgtcagataacgaaacagaatggctgaaaaaaagagatgcatacaccaaggaggctttgcattcttttttgaatagggccacttcgaatttcagtgacacttccttgctatccactctttttggtagcaactcttccaatatgcctaagattgccgtcgcctgttctggtggtggttaccgtgccatgttgtctggtgctggtatgcttgctgctatggacaatcgtactgatggcgcaaatgagcatggtcttggtgggctgctgcaaggtgcaacttacttggcaggtctgtcgggtggtaactggttaacaagtactttggcttggaacaactggacgtctgtgcaagctatcgtggataatacaacagaatctaactcaatttgggacatctctcattcaattcttaccccagacggcattaacatctttaagactgggagtagatgggacgacatatcagatgacgttcaggataaaaaagacgccggtttcaacatctctttggcggatgtttggggccgtgctcttgcgtacaatttttggccaagcttacaccgtggtggtgtagggtacacatggtcaactttaagggaagctgatgtcttcaagaatggagaaatgcccttccctatcactgttgcagacggtagatacccaggtaccaccgtgataaacttgaatgccactcttttcgaatttaatccctttgaaatgggttcatgggaccccactttgaacgcatttacggatgtgaagtatttaggtaccaacgttacaaacggtaaaccagttaataaaggccaatgcattgccgggtttgataacactggtttcataacagccacttcatctacgttgtttaaccaatttttactaagattgaattctaccgatttaccttcatttattgctaacttagccaccgatttcctggaagatttatccgacaatagtgacgatattgcaatttacgccccaaatccattcaaggaagctaattttcttcaaaagaacgcaacctccagtattatcgaatcagaatatctatttttggttgatggtggtgaagataaccaaaatattcctttagttccattgttgcaaaaggaacgtgaactagatgttatttttgcattagacaattctgctgatactgacgactattggccagatggtgcttcattagttaacacttatcagcgtcaatttggcagccaaggtctcaatttgtctttcccatatgttccagatgtgaacacatttgtcaacttggggttgaacaaaaagccaaccttttttggttgtgatgcaagaaatttgacagacttggagtacattccaccattaattgtttacattccaaattcaagacattcatttaatggtaaccaaagtacttttaagatgtcatactccgattcagaacgtcttggtatgattaagaatgggtttgaagctgccacaatgggtaattttactgatgattctgatttcttgggctgtgttggttgcgccattatcagacgtaagcaacaaaacttgaatgctacattgccctctgaatgcagccagtgttttaccaactactgctggaacggtactattgacagcaggtcagtctcaggtgtaggaaatgatgattattcttcttctgcttccttgtctgcctccgccgctgctgcctctgcctctgcctctgcctctgcttccgcctctgcctctgcttctgggtcttccactcataagaaaaatgcgggcaatgctttggtgaattattctaacttaaacactaacacttttattggtgtcttaagtgtcattagtgccgtcttcggtctaatttaggctctttcttcgtttctatttcttttctaaaagaatacgagagtgagaaaagcgcaaaaatatcaacatacaaatagtttacgagatctcaagtgcataccgcatcttatttttacaaactcgaaatcttacgagcattaacatttacataccgggtgtcttccctacatatatctatcta

SEQ ID NO: 2317 - DNA, 2286 bp, Saccharomyces cerevisiae
tagtgtgccttcaaatcttatcaagggttagaagtgagttaaaattcactcgcgctggtaaagtaacacttcttacgcagatgcaattacggaacatattacaggctagctcgctaatttctggactttcgctcgctgcagattcgtcgtccactactggtgatggttatgctccatcaataattccttgtcccagtgatgatacctctttagttagaaacgcgtctggcttatctaccgctgaaactgattggttaaagaaaagagatgcgtacactaaagaagctttacattccttcttaagcagagctacttctaacttcagtgacacttctttgctatccactcttttcagtagtaactcttccaatgtacccaaaattggtattgcatgctctggtggtggttatcgtgccatgttgggtggtgctggtatgattgctgctatggacaatcgtactgatggtgctaacgagcatggtcttggtggtttactacaaagttccacgtatctatcgggtttgtccggtggtaactggttgactggtactttggcatggaacaattggacctctgtacaggaaattgtagaccatatgagtgagagcgattccatctggaatatcacgaaatccattgtgaaccctggtggctctaatttgacctacacaattgaaagatgggagtccattgtacaagaagtgcaggctaagtctgatgcaggcttcaatatatctttgtcggatttgtgggcccgtgcactttcttacaacttctttccaagcttgccagatgctggctccgctttgacttggtcctctttgagagatgttgatgtgttcaaaaacggtgaaatgcctttaccaattactgttgcagatggtagatacccaggtaccaccgtgataaacttgaatgccactcttttcgagttcactccatttgaaatgggttcttgggatccttctttgaacgcttttacggatgtgaaatatctaggtaccaacgttacaaatggtaaaccggtcaacaaggatcaatgcgtttctggttacgataatgctggatttgtaattgccacatccgccagtttattcaacgaattttccctggaagcttccacttcgacctattataaaatgattaatagttttgccaacaagtacgttaacaacctatcccaagatgacgatgatattgcaatttacgctgcaaatccattcaaggatacagaatttgttgaccgcaattacacttccagtattgttgatgccgatgatttgtttttagttgatggtggtgaggacggccaaaatttgccgttggttccactaatcaagaaggaacgtgacttggatgtggtgttcgcattggatatatccgacaatactgatgaatcatggccaagtggtgtgtgcatgacgaacacttatgagcgccagtattctaagcaaggtaaaggaatggctttcccatatgttccagacgttaacaccttccttaacttgggcttaactaataagccaacgttttttggttgtgatgcaaaaaatttgacggacttggagtatattccacctttagttgtatatatcccaaacacaaaacattcattcaatggtaaccaaagtactttgaagatgaactacaatgttacagaacgtcttggaatgatcagaaatggttttgaagctgctacaatgggcaactttacggatgactctaactttttaggttgcataggttgtgccatcattagacgtaagcaagaaagcctaaatgccaccttgccccctgaatgtaccaaatgttttgcggattactgctggaacggcacactaagtacctcagctaatcctgaactatcgggaaatagtacgtatcaaagcggtgctattgcctctgcaatctctgaggctactgacggtattccaataacggctctcttaggttcatcaacctccggaaatactacatcaaactcaacaacctcgacttcatcaaatgtcacttctaactcaaactcttcgtcaaatacaactttaaactcaaattcttcatcctcttcaatttcttcctctacagctcgttcttcttcctctacggcaaacaaagcgaatgctgcggctatttcctatgcgaacactaatactctaatgagtttgttaggtgccataacagcattatttggactaatttagaagcccttctgagaaacaatacataatacatcctttcacccaaaaggataatgacaagtaaatgtataaaaatgtgtattaatat

SEQ ID NO: 2318 - DNA, 1830 bp, Saccharomyces cerevisiae
cttaaactggttatactatttcaagagtgtaaacattttattgcatataccacagtaacgtgcaggtaaaacatgagattaagaaccgccattgccacactgtgcctcacggcttttacatctgcaacttcaaacaatagctacatcgccaccgaccaaacacaaaatgcctttaatgacactcacttttgtaaggtcgacaggaatgatcacgttagtcccagttgtaacgtaacattcaatgaattaaatgccataaatgaaaacattagagatgatctttcggcgttattaaaatctgatttcttcaaatactttcggctggatttatacaagcaatgttcattttgggacgccaacgatggtctgtgcttaaaccgcgcttgctctgttgatgtcgtagaggactgggatacactgcctgagtactggcagcctgagatcttgggtagtttcaataatgatacaatgaaggaagcggatgatagcgatgacgaatgtaagttcttagatcaactatgtcaaaccagtaaaaaacctgtagatatcgaagacaccatcaactactgtgatgtaaatgactttaacggtaaaaacgccgttctgattgatttaacagcaaatccggaacgatttacaggttatggtggtaagcaagctggtcaaatttggtctactatctaccaagacaactgttttacaattggcgaaactggtgaatcattggccaaagatgcattttatagacttgtatccggtttccatgcctctatcggtactcacttatcaaaggaatatttgaacacgaaaactggtaaatgggagcccaatctggatttgtttatggcaagaatcgggaactttcctgatagagtgacaaacatgtatttcaattatgctgttgtagctaaggctctctggaaaattcaaccatatttaccagaattttcattctgtgatctagtcaataaagaaatcaaaaacaaaatggataacgttatttcccagctggacacaaaaatttttaacgaagacttagtttttgccaacgacctaagtttgactttgaaggacgaattcagatctcgcttcaagaatgtcacgaagattatggattgtgtgcaatgtgatagatgtagattgtggggcaaaattcaaactaccggttacgcaactgccttgaaaattttgtttgaaatcaacgacgctgatgaattcaccaaacaacatattgttggtaagttaaccaaatatgagttgattgcactattacagactttcggtagattatctgaatctattgaatctgttaacatgttcgaaaaaatgtacgggaaaaggttaaacggttctgaaaacaggttaagctcattcttccaaaataacttcttcaacattttgaaggaggcaggcaaatcgattcgttacaccatagagaacatcaattccactaaagaaggaaagaaaaagactaacaattctcaatcacatgtatttgatgatttaaaaatgcccaaagcagaaatagttccaaggccctctaacggtacagtaaataaatggaagaaagcttggaatactgaagttaacaacgttttagaagcattcagatttatttatagaagctatttggatttacccaggaacatctgggaattatctttgatgaaggtatacaaattttggaataaattcatcggtgttgctgattacgttagtgaggagacacgagagcctatttcctataagctagatatacaataagagcaacacagtttatcttatatgtattcaatgtatagatttcaaaatatagagtttaaatatcat

SEQ ID NO: 2319 - DNA, 393 bp, Saccharomyces cerevisiae
gcagatagtcatgtccaaatacgcttggtataccagagttacagatacattacatcgtctaacggtactgacgttggttggtggtacgttatacatgtcgggtggcttagcttacactttatacatgaacggtaagaagtacgaacaacaagtgacccaacaaaaggcacttgaagaagacaatcaacaactgcaaagtcctactgcacctcctaccgagtaaactgcgagaacccagtgctaataaaatgaagaaaaagtactagattacatttttaagtgttgcactatattctaagggcctccatcgacgtagtgtgctggttccaccttctcctcattatcatgccaatatttacgaacctgtatataataattaaatcataagaaaca

SEQ ID NO: 2320 - DNA, 1813 bp, Saccharomyces cerevisiae
agccactcatggagtcgtattcctagcatgattagattaccggagtttagaagaggatctgcaatagaagaggagacaactacaaaagaactgttaattaagagaagaagatgaagcaattcaagttggttaatgcggtttccgcatcatttgtgcttattggcttagtgttggccaattcagattcagtgttcgacaagtggacgcaggaagacctggccgattatttacgtgataataagaagagcttggaaaagtacgctacagactccattgaggacttgaaaacggaggcatcgcaggtatgggacaaacacgcgcagcccaaaccatggtggcaggtgtggtctagtgacagcagtagcgtgagcaacagtaaccccggatggtttggttatactggttcttcggatcacccagtttctgactggctctttgacacctggtccacagacagtctacgtaacttcttgaagaaaaacggcgtggatgttgacgacgctaaggcttccaaggactcgctggtgaagactgctaaggagaacttcaacaagatttccaaatctttgaagtcgtcgggatactatccttctagctcttactttgatagctggtcaaccaaagatttgcaaaactggttgaatgacaatggtatcgactacgacaaggcagttcaaagcaaggacgagctagttcagaaagtcaaggaaaacatctaccgaacttcagaaaaggcagaacagcagcgtctgggtttgctagaaagcttggatttggctcaccaacaaatattagacacatcgggacaaataaaagacactgtatttgacaagtggtctagtgatcagttaaccaattggttggagagccacaaggtcaatattgacaagaacatggccaagaaacacgactatttggttagaatggccaaagaaaattctgccaatttgaaagatgatatctactggtacctggactatatgaaaagagagtcttctccatttttgaccaagaccccagaatacgttggttccgtttgggactcttctaaaaatttcctcacaaatttgtactccaagttcagaggtaagactgacaatgtgatcaatgatacttttttggttggcctagactcttggccaaaggacaaattgaaaatgtttttagatgctcgtggtattaagtactcaatgctgtctactgaacatcaattgagagaattagtcaaaaaatccagaaacgaaaaactcaagatcctgccaaaagactaccaaaaatactttgacaacagtaactggtctttggatgacataaagggttggtttgctgacaaaaaggacgacttccaagattctcagacttactccacaattatgcaggattttgacaaggtttccaaaaacacaaatgatgctaaggaccaaatcgctaagacctggtcaaatacctttcagagctggtctcaagaagacctattgcagtacctaaaatcattcggtgttccggttaaacagacttctacgaaggacgacttaatcaacttggccaagcagaatacgcaatggttgttcggcactgttaaggagcctgcttacaagaggtacctacataacgttaaaaactggtcgaaaagcatattagggttcaactaatgattggggtgtcaacgtaatgtacttttctccccaatttttcttttcatccgtatattttaccgtaaaatggacaagctaatagcaaaacgaaaaaacacgttgtcacttctatataactttgcttaagtaagtattttgtctttataatgttacatact

SEQ ID NO: 2321 - DNA, 1476 bp, Saccharomyces cerevisiae
atgaaactctcaactaaactttgttggtgtggtattaaaggaagacttaggccgcaaaagcaacaacaattacacaatacaaacttgcaaatgactgaactaaaaaaacaaaagaccgctgaacaaaaaaccagacctcaaaatgtcggtattaaaggtatccaaatttacatcccaactcaatgtgtcaaccaatctgagctagagaaatttgatggcgtttctcaaggtaaatacacaattggtctgggccaaaccaacatgtcttttgtcaatgacagagaagatatctactcgatgtccctaactgttttgtctaagttgatcaagagttacaacatcgacaccaacaaaattggtagattagaagtcggtactgaaactctgattgacaagtccaagtctgtcaagtctgtcttgatgcaattgtttggtgaaaacactgacgtcgaaggtattgacacgcttaatgcctgttacggtggtaccaacgcgttgttcaactctttgaactggattgaatctaacgcatgggatggtagagacgccattgtagtttgcggtgatattgccatctacgataagggtgccgcaagaccaaccggtggtgccggtactgttgctatgtggatcggtcctgatgctccaattgtatttgactctgtaagagcttcttacatggaacacgcctacgatttttacaagccagatttcaccagcgaatatccttacgtcgatggtcatttttcattaacttgttacgtcaaggctcttgatcaagtttacaagagttattccaagaaggctatttctaaagggttggttagcgatcccgctggttcggatgctttgaacgttttgaaatatttcgactacaacgttttccatgttccaacctgtaaattggtcacaaaatcatacggtagattactatataacgatttcagagccaatcctcaattgttcccagaagttgacgccgaattagctactcgcgattatgacgaatctttaaccgataagaacattgaaaaaacttttgttaatgttgctaagccattccacaaagagagagttgcccaatctttgattgttccaacaaacacaggtaacatgtacaccgcatctgtttatgccgcctttgcatctctattaaactatgttggatctgacgacttacaaggcaagcgtgttggtttattttcttacggttccggtttagctgcatctctatattcttgcaaaattgttggtgacgtccaacatattatcaaggaattagatattactaacaaattagccaagagaatcaccgaaactccaaaggattacgaagctgccatcgaattgagagaaaatgcccatttgaagaagaacttcaaacctcaaggttccattgagcatttgcaaagtggtgtttactacttgaccaacatcgatgacaaatttagaagatcttacgatgttaaaaaataa

SEQ ID NO: 2322 - DNA, 1011 bp, Saccharomyces cerevisiae
aaccgcgtgaagaaaatgtcaaaagaagacatagaaggaactaacattctagacgaacctgtccacgggatctatattcctgccgcgctattcgttgttggtgttgcaatcaccacgtatatgtctggtgaattgaaaatcctgtggagtttacccattctcttcatgatcatcttcgtcagagcatactctgcctacaaaagaagaagatcactgtatccagataggtggacttcgttagaattggaagatcaaaccataatttccaagaataccgccctgtatcgttttaagttgaagacaagactggaaagcttggacattcccgctggtcatcatgttgctgtacgcgttccaattgacggcaaacaagaggtcagatactataatccgatcagttctaaactagaaagtggatacttggatttggtggtgaaagcatacgttgatggtaaagtctccaaatatttcgctggcttaaattctggtgacaccgtggatttcaaggggccaataggtactttgaactacgaaccaaattcctccaagcatttaggtatcgtagccggtggttctggtatcacgccagtcctacagatcttgaatgaaatcatcaccgttcctgaagatttgacgaaagtctccctgctatatgccaatgagactgaaaatgacattctattgaaggacgaactggatgagatggccgaaaaatacccacatttccaggtccattacgtggtacactatccatccgacagatggaccggagatgtcggctacatcaccaaggaccagatgaacaggtatctgccggaatattcggaggataacagactcttgatctgtggacctgatggaatgaacaacttggcccttcaatacgctaaagaactgggctggaaggtcaattcaacgagaagttctggcgacgatcaagtcttcgtcttttaacggaataagcttcgtatatacaatagaaaaattttccatacaatattacataatact

SEQ ID NO: 2323 - DNA, 1470 bp, Saccharomyces cerevisiae
aagcgacttgagacaatgagagaggtcattagtattaatgttggtcaagcaggttgtcaaataggtaatgcatgctgggaattgtactccctagagcatggcatcaaggaagacggccatttggaggatggcttgtcaaaacctaagggaggtgaagaaggattttctacattcttccatgaaacggggtacggaaaattcgtcccaagagcaatctacgtggatttagagcccaatgttatcgatgaagtacgtacaggacgtttcaaggagcttttccatccagaacaattgattaacggtaaggaagatgccgccaataactacgcaagaggccattatacagtgggtagagaaatagtggatgaagttgaagaaagaattagaaagatggccgaccaatgtgacggtttacaagggttcttgttcacccactccctcggtggtggaactggttccggtttaggttccctgttattagaaaacttatcgtatgaatacgggaagaaatccaaattggaattcgccgtttatcctgcgcctcaattgtctacttccgtcgtggaaccttacaacacggttttaaccacgcataccaccctggaacacgcagactgtacgtttatggtcgataacgaagccatttacgatatatgcaagaggaacttgggaatttctagaccaagcttcagcaacttgaacgggttgattgcccaagtgatatcatctgttacagcctctttgaggttcgatggttcattaaacgtggatttgaacgaatttcagaccaacttggtaccatatccaagaattcatttccctttggtttcctacgcacccatcttgtccaagaagagggccacccatgaatccaactccgtgtcagaaatcacaaacgcttgtttcgaaccgggcaatcaaatggttaagtgtgacccaacaaaggggaagtacatggctaactgtttgttatacagaggtgacgtggtgaccagagatgtccaaagagccgtcgaacaggtgaagaataaaaaaacagtacaaatggtggattggtgtccaacaggatttaagattggtatttgttatgagccaccaagtgtgataccaagttccgaattagccaatgtggatagagctgtctgcatgctatccaacaccactgccatcgcggacgcttggaagagaatcgatcagaaattcgacctgatgtatgccaaacgtgctttcgtccattggtatgtcggtgaaggtatggaagaaggtgagttcaccgaagctagagaagatttagctgccttagaaagagattatattgaagtgggtgccgattcttacgctgaggagttctaagaaagtggctctgatcccgatacccacttatagatttatatttacttaatgtccatatgtatatacatatatatatatatatatatatacgcttatatatatatatgcatattctat

SEQ ID NO: 2324 - DNA, 1910 bp, Saccharomyces cerevisiae
acaacaaacaaaactccacgaatacaatccaaatgagttccgtcaataaagatactattcatgttgctgaaagaagtcttcataaagaacaccttaccgaaggtggtaacatggccttccacaaccatttgaatgattttgctcatattgaagatcctctggaaagaagaagattggctttggagtccatcgatgacgaaggtttcggttggcaacaagttaagaccatctccattgctggtgttggtttcttgacagattcttatgatatttttgccattaatttgggtatcactatgatgtcctacgtttactggcacggtagtatgccaggtccaagtcaaaccttgttgaaggtttccacttctgttggtactgttattggtcaatttggttttggtactttagctgatattgttggtcgtaagagaatttatggtatggaacttattatcatgattgtctgtaccattctgcaaaccactgttgctcattctcctgctattaacttcgttgctgttttaacattctaccgtattgtcatgggtattggtatcggtggtgactacccactatcttctattattacttctgaatttgccactaccaaatggagaggtgccatcatgggtgctgtctttgctaaccaagcttggggtcaaatctccggtggtatcatcgctcttatcttggttgctgcttacaagggcgaactagaatacgcaaactctggtgctgaatgtgatgctagatgtcaaaaggcttgtgaccaaatgtggagaatccttattgggttgggtaccgttctagggttggcatgtttgtatttcagattaactattccagaatctcctagatatcaattggatgttaacgctaagttggaacttgctgctgccgcacaagaacaagatggcgaaaagaaaattcacgacaccagtgatgaagacatggcaattaacggtttggaaagagcttctactgccgtcgaatctcttgacaatcatcctccaaaggcttcgttcaaagatttctgcagacattttggtcaatggaagtacggtaagattttgctaggtactgctggttcatggtttaccttagatgttgctttctacgggttgagtttaaacagtgctgttattctgcaaaccatcggttatgccggttccaaaaacgtttacaagaaactgtatgatactgctgtcggtaatctgattttgatttgtgctggttcattacctggttactgggtatccgtcttcactgtcgatataatcggtagaaaaccaattcaattagccggtttcatcatcttgaccgctttgttctgtgtcatcggtttcgcataccataaacttggtgaccatggtctgttggctctttacgtcatttgtcaattcttccaaaacttcggtccaaacacaaccacctttattgttcctggtgagtgtttcccaactcgttacagatctactgctcatggtatttctgctgcatctggtaaggtcggtgccattattgcacaaaccgctttgggtactctaatcgaccataactgtgctagagacggtaagccaaccaactgttggttacctcacgtcatggaaattttcgccttattcatgttgttgggtatcttcacaaccttgttgatcccagaaactaagagaaagactctagaagaaattaacgagctataccacgatgaaatcgatcctgctacgctaaacttcagaaacaagaataatgacattgaatcttccagcccatctcaacttcaacatgaagcataaaagcctcaaagatgcactaaaacttgtaaactagaacaaataatacaaaaacatttttataaacttattatcaaaccccttacataatctataaatactgtcaggttacatatt

SEQ ID NO: 2325 - DNA, 1933 bp, Saccharomyces cerevisiae
tgtcagtttcatcacatcatcgaattacacgtttacccaagagaagaaactaaaaaccactatgctatcgaagaatttgtatagtaacaagaggttgctcacctcgacgaatacgctagtcagattcgcttccaccagatccacaggggtggaaaactccggagcaggtcctacatcttttaagaccatgaaagtcattgaccctcagcacagcgacaaaccaaacgtgctgatactgggttcggggtggggagctatttcgtttttaaagcacattgacaccaagaagtacaacgtttccatcatctctcctagaagctatttcttatttacgcctttgttaccttctgcaccagttgggacagtagacgaaaagtcaattattgagcccatcgttaattttgctctcaagaaaaaggggaacgttacctactatgaggcagaagccacctctatcaatcccgacaggaataccgttaccataaaatcattatctgccgttagccagctataccaacctgaaaaccatctagggctgcatcaagcagaacctgctgaaattaagtacgattatttaatcagtgctgtaggtgcggaacctaacacatttggtattcctggggtcactgattacggtcatttcctgaaggaaattcccaactctttggaaataagaagaacttttgccgccaatctagagaaggctaacttattgccaaagggtgatcccgaaagaagaagactactgtccattgtcgtggttggtggtgggcctactggtgtagaggccgctggtgaactacaggattatgttcaccaggacctgagaaagtttctccctgcattggccgaagaagtccaaattcacttggtcgaagctctgcccatcgttttgaatatgtttgagaaaaagctttcatcatacgcgcaatcacatttagaaaacacttcgatcaaagtacatctgagaacggctgtcgccaaagttgaagaaaagcaattgttggcaaagaccaaacacgaagacggtaaaataaccgaagaaactattccatacggtactttgatttgggccacgggtaacaaggcaagaccggtaatcactgaccttttcaagaaaattcctgagcaaaactcgtccaagagaggattggcagtgaatgactttttgcaggtgaaaggcagcaacaacattttcgccattggtgacaatgcatttgctgggttgccaccaaccgcccaagtagcgcaccaagaggccgaatatttggccaagaattttgataaaatggctcaaataccaaatttccaaaagaatctatcttcaagaaaggataaaattgatctcttgttcgaggagaacaactttaaacctttcaaatacaacgatttaggtgccttagcatacctgggatccgaaagggccattgcaaccatacgttccggtaagagaacattttacaccggtggtggcttaatgaccttctacttatggagaattttgtacttgtccatgattctatctgcaagatcgagattaaaggtctttttcgactggattaaattagcatttttcaaaagagacttttttaaaggattatagatgaaattaacatgcccttttctggaaaaaggaaaaaaggtggtaggcaccgttttttcctgagtttgcatccttttttttctaaaaccctctaaacaaaacctaacacacacacacacgcacaaaaaaatgcacatgatgttttattatttatatattcccacttttttcgaaatgatgcttgactaatgcacaagcaaaaaaccccgacaagattggttgatcacttcagctttttcctcccattgtcctatatatatatctgtgattatttatttcttcctcttatgtttctctatttattttatacgccaaatcccatttgtatat

SEQ ID NO: 2326 - DNA, 1684 bp, Saccharomyces cerevisiae
agtaacagtcatttgagcttgttgacctaccaattaacacaaaaaaatgggcatgttttttaatttaaggtcaaatataaagaagaaagccatggacaatggactaagcctgcccatttcaaggaacggtagctcgaacaacatcaaggacaaacgctcagagcataactccaactcattaaagggcaaatacaggtaccagccgcgctccacaccgtctaaattccagcttacggtgagtatcacatctcttattattatcgccgttctgtcgttatatctctttatatcatttctctccggaatgggcattggtgtatccacgcaaaatggtaggtcgttgttgggttcctcaaaatcctccgaaaattacaagactatcgacctagaagatgaagaatattacgactatgattttgaggatatcgatcctgaagtgatttcaaaatttgatgatggtgtgcaacattatctaatatcacaatttggttcagaagtgttgactcccaaggatgatgaaaaataccaaagggaactcaacatgctttttgattccactgttgaggagtacgacctgtcgaattttgaaggtgctccgaatggattggaaacacgtgatcacattcttttatgcattccactaagaaacgctgcggatgtattgccattaatgttcaagcatttaatgaacctaacctatccacacgagctgattgatctggcctttttagtcagtgattgctcagaaggtgacactacgttggatgctttaatagcgtattctaggcacttacaaaatggcacgttgtctcagatttttcaagagattgacgctgtcattgattcgcaaacaaaaggcaccgataaattatatcttaaatatatggacgaaggttatatcaaccgtgtccaccaggcattttcaccaccattccatgaaaattatgacaagccatttagatcagtacaaattttccaaaaggattttggccaagtaattggacaaggttttagtgacagacatgccgttaaggttcaaggtataagacgaaaactaatggggagggcaagaaattggttaactgccaatgctttgaaaccttaccactcatgggtttattggagagatgctgatgtagagctgtgccctggttcagtcattcaagatttgatgagcaaaaactacgatgttatcgtccctaacgtttggagaccactacctacatttttgggaactgaacaaccatatgatttgaattcttggatggaatctcaggaggcactagcattggcaaagactcttgacgaagatgatgttattgtagaaggctatgcagaatatcctacgtggagagttcacttagcctatatcagagatgcagaaggtgatccaaatgaagcggtggacttggacggtgtagggggagtttctattttggcgaaggccaaaatatttagaaacggggtacagtttcctgcatttacttttgaaaatcatgcagaaacagaagcatttggtaaaatggcaaagaaaatggggtacagggttggtggtttaccgcattatactatttggcatatttatgaaccgagcgatgacgatttgaaggaaattgcgtcaagggaaagagagaagagaagacaatcagagtaagaatcatgatgacatttaatattaatttaa

SEQ ID NO: 2327 - DNA, 1215 bp, Saccharomyces cerevisiae
gcaaagggaatagtacagatcgcagcaagaaagatataatgttgatttcttcacggatcgttcgaagctcgctggtaaatgtcccgctaagattatctaggtgttttacgcaagctcacagagcatgcaaagaagaagaagttaatagtcctttatcatccgcagctgaacagccagagcagaagtatacgcattttggttcgaagactgtattgaagtctaccaagcagaagttagttggtgatgtcttttcttccgtggccaatcggtatgacttgatgaatgatgttatgtcattaggaattcatagattgtggaaggaccattttatcaataaactagatgcgggaaaaaggccaaactctacgactcctttgaacttcatagatgtggctgggggatccggtgatattgctttcggattactagaccatgctgagtcgaaatttggtgacactgagtctacaatggatattgtagatatcaaccctgacatgcttaaagaaggtgagaagagagccatggaacaaggaaaatatttcaaggatcctcgtgtgagatttttggtttctaatggtgagaaactagaggagattgattctgattccaaggacatctacacagtctccttcggtatcagaaatttcaccgatattcaaaagggtttaaacactgcttatagagttttgaaaccgggcggtattttttattgtctagaattttccaaaattgagaatcccctaatggactttgcttaccaacagtgggctaaggtcctacctgtaatgggctcgatgattgctaatgactacgactcttaccagtatttggtggagtctatcgaaagatttcctgaccaagaaacgttcaaatccatgattgagaaggcaggattcaaatctgctggctacgaaagtttaacttttggtatatgtgccatccattggggcattaaagtttaaagtaaatagaacaaatttccttttttttttgtcaagaaaatcgaagctagtaaaacatgcctatactatttctgtctctcttcttctttagtaatacctgtgccatgtgatagccatatattttgctgtgatgtgcagaattcgtatatactagggggaaatagaacgaaagaaagaaagaaaaaaaaaaaaagaaataagtgactgtacataatataataatattaatgatattaatagtaataggtatatt

SEQ ID NO: 2328 - DNA, 931 bp, Saccharomyces cerevisiae
tatagtatcataaagtcaaaatgcctagattagaagagattgacgatttcaatgatatcgacgaccttgatatggaattggccgagttagatccatctttgaggacgccgatcgctcccaagataacgcctaaggttgtaaggagccaggaccaagagaaccctgcatttttacctggcacgaataacaacagtaatagcaacaacaatagtagcaacgaaaaagagcagttgagttttattaacccaaaaactggtaaggttgaacgttcggaggctatttcgaagaaagatttagaagaagtcaaaagattccaagtactctatccatgttactttgacataaacagatcacataaggaagggagaagggttcctaaggagttggctgttgaaaatcctttggctaaaactatggcagatgctgtccgtgaattgggaatattatgcatttttgaaggtgaaaaatgtcacccacaagattttggtaatcctggtagaattcgtgtacttttcaaagaaaatggacaattaattggcgcagccactaaattcaaaggtggaaagaggcaattaatgaaagctgttggggagtatatgaaaagacatccaactactattgaatctttaagggagattccatatggccctgatttcgacaatattgaattcaaaaagattccacgtgtaaagggattcaaaatgaatgagattgttccgctgcatagtccgttcttgatgggccacccaatgacaaaatctgtttacgaaactcctaagattacagcggcagaaaagtcgttcaagccaccaaaaaataagtacaaagtagttagaagatgattgtctcctttacccatttatgtatatgtatatgtatattgagattaatatattaatatattaatagattataatagcagaactataag

SEQ ID NO: 2329 - DNA, 5056 bp, Saccharomyces cerevisiae
ataaccctttccaccgctaaaaaaaggaccccatcagccatggctacaccttcatttggcaattcctctccacaattgaccttcactcatgttgctaattttatgaacgatgctgctgctgatgtatccgctgtggatgccaagcaattggcccaaataagacagtttttgaaagctaacaagacaaatcttatcgagagtctgaacacaataaggcagaatgtaacttcttccggcgatcataacaagttacgctctacaattgcaaacttattgcaaataaacgtcgataatgatccattctttgctcaatctgaggacctttctcatgctgtagaattctttatgtctgagagatcatctagacttcatatagtatactcacttctcgttaaccctgacatcgacctcgagacatattcatttattgacaacgatagattcaatgtagtggggaaattgatttctataatatcatctgtaatccagaactacgacattattacagcttcatctttagcacatgattataataacgatcaagacatgttcacaattgtctcattggtgcagttaaaaaaattttctgatttgaagtttatcttgcagatattacaaattttgaatttaatgatcctcaacacaaaagtaccagtagatatcgtcaatcaatggtttctacagtatcaaaatcaatttgttgaattttgcagaaatataaattcaacagacaagagtatagatacctcgtcactacaattgtacaagtttcagaatttccaagacctcagttacctctcagaaacgcttatttccaggatttcatctttatttactatcacaactatattgatacttggactgaacacttcaatcgcgcaatttgatattcagtcacctttgtacatggatacagaaactttcgacaccgtcaatagcgctctagagaatgatgtagcaaccaatatcgtcaacgaggaccccattttccatccaatgattcattactcctggtcatttatactttattataggcgagcattacaatcgtcggaatcatttgatgattcagacataacgaaatttgctctgtttgctgaatcacatgatgttcttcaaaaattgaatactctctcagaaattctatcctttgatcctgtttacaccacagtaataacagtatttttggagttttctttaaattttattcctataactgcatctacttcccgggttttcgccaagataatttcaaaggcaccagagcagttcattgagaatttcttaactaatgacacttttgagaaaaaattgagcatcataaaggctaaattgcccctattgaacgaatcactgatcccgctaattaatttagccttaattgataccgagtttgccaattttgaattaaaagatatatgttcatttgctgttaccaaaagtagtttgaacgatttggattatgacttaattgctgatacaataacaaactcttcttcatcctccgatattatagtgcctgatttgatagagttgaagtctgatttactagtggcgccacccttagaaaacgaaaactctaattgtctcttgtcaataccaaaatcaacaaagggaaaaattcttactatcaaacaacaacaacaacaacaacaacaacagaatggacaacagccgccaactacttccaatttgattattttcctttacaaattcaatggttggtctttggtgggtagaatattgcaaaatctattacattcatatatggaaaagggtacacaactggatgacttacaacatgaattgatgatatccataataaagttagtcactaacgttgtcgatccgaaaacctcgatcgagaaatctagtgaaattctgtcatatttatcaaattctctggatacttcagccagcaccataaatggagcgtcgattatccaagtaattttcgagatttttgaaatatcactacaaagaaaagattatacctcaattgtacaatgttgtgaatttatgactatgctgacaccgaattaccttcatcttgtttcttcttacttgaacaaatcggatttgttagacaaatatggtaagactggtctttccaatatgatactcggttcggttgaattatctacgggggattacacattcactatccaattgcttaagctaacaaaagtctttattcgagaatctctctcattgaaaaatatccatatttccaagagaagtaaaattgatattattaataagttgattctacatgcaattcatatctttgagagttattacaactggaagtacaacaacttcttacaaaaattcgaaattgccttccatttgacattaattttttatgatgtacttcatgacgttttcaccataaatccacatcaaaaggatcagttaatcatttcctcgtcagcaaacaaattgttgcagttatttttgactcccatggattccattgatttggctccaaatactttgacgaatattctgatttcaccattgaataccacaacaaaaattttaggcgacaaaattttgggtaatttatatagcaaggtaatgaataactccttcaagctgtgcacgcttttgatcgctattcgaggtagcaatcgtgatttaaagccaagcaacctggaaaaattgcttttcataaattcatcaaaattggttgacgtttataccctaccaagttatgttcatttcaaagtgcagatcatagagttgttaagctatttagtagaggctccttggaatgacgactatccatttctgttatctttccttggtgaagcaaagtcaatggcatttttgaaagaagtcctgtcggacctgagctctccagtgcaagattggaaccttctccgaagtttgtacattttttttactaccctattagaaagtaaacaagatgggttatctatcctcttcttaacaggtcaatttgcctccaataaaaaaattaatgacgaatcctccatagacaaaaagagttctatattaactgttttgcaaaagaattctttactattagattcaacgcctgaagaagtaagttgcaagttattagaaacgataacatatgttttaaacacttggacaaattctaaaatattcataaaagatcctaaatttgtgaattccttattggctaagttgaaggactcaaaaaaattatttcagaaaaaggaaaatttgactcgtgacgaaactgtttctttgattaagaaatacaaattgatctcaaggattgtagaaatatttgcgttgtgtatttacaactccactgattcaaactcggaaattttaaattttttgaatcaggaagacttgtttgaattagttcatcatttcttccaaattgatgggttcaataaaacttttcatgatgaattaaacttaaaatttaaagagaaatggcccagtttagagcttcagtcgttccaaaaaattccattatccagaataaacgaaaatgagaatttcggttatgatattccgttattagatatagttttaaaagctgaccgtagttggaacgaaccaagtaagagtcagacaaattttaaggaggaaataacagacgcttcattaaatttgcagtatgtcaattacgaaatatctaccgcaaaagcatggggcgcactaatcaccacgtttgtgaagaggagcactgttccgttaaatgatggttttgtcgacttggtagagcatttcctcaagttaaatattgattttggttcagataaacaaatgtttacccaaatatatctggaaagaattgagttgtcgttttacattttatattcgttcaagttgtcgggaaaattgttgaaggaagaaaagataattgaattgatgaacaagatttttacaattttcaaatctggtgagattgactttattaaaaatattggtaagtcactaaaaaataacttttatagacctcttttgagatctgtcttagttcttctcgagttagtctcgtcaggagatcgttttatcgaattaatatctgatcaactactggaattttttgaattagtgtttagtaagggtgtttatttgatactgtctgagatattatgtcagatcaataaatgctccacgaggggtttaagcaccgatcacaccacccaaattgtcaacttggaggataatactcaggatttattgttattattatcactcttcaagaagatcaccaatgtgaatccctctaaaaacttcaatgttattctagcatcatccctaaacgaagtaggaactttgaaagttatactgaacctatattcaagcgcgcatttgataaggattaacgatgaaccaattcttgggcaaattactctgacctttatctccgaattgtgttctattgagccaattgctgcaaaactcatcaacagtggattgtatagcgttctattggaaagtccactatctgttgcaatacagcaaggtgatataaaacctgaattttcgcctagattgcacaacatttggagcaatggtttgttatccattgttctactactattaagtcagttcggtatcaaggttttacctgagacgtgcctatttgtttcatattttggaaaacaaataaaatctacaatatataactggggtgacaacaagttagcagtgtcaagttcgttgataaaggaaacgaatcaattggttttattgcaaaaaatgctaaacttgctaaattaccaagaattgtttattcagcctaaaaactctgatgatcaacaagaagctgtagaattggttattggtctagattctgaacatgataaaaaaaggttaagcgctgcattaagcaagtttctaacacatccaaaatacttgaattcaagaataatacctacaactttagaagagcaacagcagttggaggatgaatcaagcagattggagttcgtcaagggtatcagcagagacattaaagcattacaagattcactatttaaggacgtttaacttattttgcaggttatgtaaagctacataatataataatgaacagtgc

SEQ ID NO: 2330 - DNA, 511 bp, Saccharomyces cerevisiae
ttactacaatggtgcccgctttagaataataactcgggacacatttatacattcccacacacacagacgaggcacggctacccacgcgcacaaaagtaaaaatggatggatcgactatagtgtttatactgacgatggtgtgcttgtttgtttacaccgtgaaacacaggggcgccaagcaagtaccctcgcgaaccgtacaggatgccaaaccggcgccctcggtcgccaccaacgacccttctccggagccagtaccatcggctccggaggaacgcgttgctcggttaaacagacatggtagtgatcgaaagagagccgttaatagtgacatggttgaaatcgtgatgacgatggcgccacatgtgcctcaggaaaaagtcgtgcaagatctcaggaacacagggtccattgagcacacaatggaaaatatcttcgctggcaaactagattaggcattcttatgtaccgcattaaatatattaaaaatcacaaatcgactggcgtagga

SEQ ID NO: 2331 - DNA, 2760 bp, Saccharomyces cerevisiae
tttaagttgcagatataatgggaatttccagcaagaatggccctaaaaaaatgggaagggcaaagacgtttactgggtgttggacgtgcagaggaagaaaagttaagtgtgatcttcggcatccccactgccaacgatgtgaaaagtctaatttgccttgtggcggttatgatatcaaactccggtggtctaagcctatgcaatttgacccgtacggtgtcccaatcccacaaaattctcctgcaactactacgaacttatcaggtagtgtcgatgaaccacaataccaacgacggaacatcgattttgtgcgctatgatgaagaatacgtgtatcatgaagatatggatgatgagctaacaatgctgcatactcccccaattgagaaaataagcgataacaagacgtggatcataaagaaatttggggtgtttaaaggaacagataagatcgacaagcagtacgctccaaggaagaagcgcaataggaaaagagttgccaaaagcttggagagctcagcttctatttcgttatcttctttaccatcttcttcaactatttcctttccaattagacatattgaagacaagttgagaaataaagggcatgtaaagacaggtattctctctgctaatgatggtgttccaccaacaccaaatcttttagattatgactggaacaatctgaatataacaggttacgaatggatctcgagtgaactcagagatgatgcattattgtcagcggtgaccttacagggacatcacttaggacacacacagccacaagaaatctcattagaggaaaactctaatgtcgtgagtggggaagagcatgtgaatgccaaagaacatggatgtgcctttgaggctgataatcaaggttcatcaactttacctaataaagcagccagtgccaatgataaactttaccagcaaaacttgaagttactcttccagaaaaactcttcgaacagtgaggaaccagaccctcaagcattgatcgacgatgtgttcgtcaatattgaaccaagatctctgcccgcatctgatctgaataaaataactctagctcctccaaatgaagaatcacgcatgcctaagtccatgttagaactcacatcctattccagtgacctaccacctgaattggtagatattatacccaaaacagaccttaccgtacatggtttagcgagatttcttttaaatcattattttaataatgttgcagataaaatgacagtggtcgtgctcgaaaagaacccatggaaaacattatacttccccagagccttgatggcattaggcgatttagcgggtttgggacaatcctccaactcgaggaatgcgttgttgaatgctcttcttgctgtctcttgcttccacttgcaaagcaagtacccaaggaactacaaactacaaaaatactttctgggcctaggtatcgaattgagaaatcaagcctcgaactttctaagattatgtttgaacacaaaatcaagcatacctgagaaatataaagacgtactaactgcgatcttatctatgaactctattgatgttgtatgggggacgatggcagattgccaggatcacttggctctttgtgaagacttcgttgagtcaagaatgaaactaagacctaatatttctgaaaagacaaaaaccttacacaggattttctcgtttctgaagttaattcaagatagcactgcgttggataaagtcagggcaaaggaaattgttattttaccaagtgaagaagatgataattacaaaccattagatacatctaacgctactaccagtagcagtgagccaagagttgacgttgtgcaggaaggtttatttagagaggcactcaatgaaaatgacggcaaaatacatattgaattcgttaaggagcctatcacaaacgtatccgctgactctactccatcttcgaccactcctccaatttttaccaacatagcaacagaaagttactataataaatctgatatatctaagctagtatcgaagactgatgaaaacataattggtacagattcactctatggattgcctaattcattaatattactattttcagactgtgttaggatagtgagacataatgaatattataatttaacttacctacctgtaccccgaaaatttaatgaactctcgttaaatttcgaaaaaagattattgaaatggaaatcagaatggaacttccatcaagaaaattcggagggaaaaagcttcataaactcaacggctgaagcactatatcaccatacaatgagcttttatttcagtttaattatttattattttacaatggcaagaagtttaaattgccaatttctacaaaactatgttgccaaagtattagatcacttaaatgcaatggaagaattggtggatcaaaaaaaagtgaaaattgtccctttaatttggcaaggtttcatggcaggatgtgcttgcacagatgaaaacagacagcaagagtttagaagatgggcagccaaattagctgaaagtggagtgggctcctattggggagccaggcaagtaatgttggaagtttggaggcgacggaaagaggatgagccgggcgataattggtattctgtttataaagattgggaaatgaatctgatgctatcataaatatgttatttttggatttttcatgaatagccggagccagtagctggaagagctgtgtcttgaaataattctttacaatacatatgcacataccataaag

SEQ ID NO: 2332 - DNA, 854 bp, Saccharomyces cerevisiae
caatcaacacagttctataattatgaccgacagatattctttttcgttgaccactttttctcccagcggtaaattgggtcaaattgattacgccttgacggcagtaaaacaaggtgtcacctcattgggtataaaagctacgaatggtgtagtaattgccacagaaaagaagtcgtcctcgccactggccatgtcagaaacactttcgaaggtatccttactaacaccggacattggtgcagtatattccggtatggggcctgattatagagttttagtggataaatcaagaaaggtagcacatactagttataaacgaatttatggtgaataccctcccaccaaattactggtttctgaagtagccaaaataatgcaagaggctacacagtccggtggtgtcagaccctttggtgtttcactgttgattgctggccacgacgaatttaatgggtttagtttatatcaagtggatccttccggttcctacttcccttggaaagccaccgctataggaaaaggttctgtggcggcaaaaacgtttttagagaaaagatggaatgatgaactggaactagaagacgccattcatattgccttactaacgctgaaggagtcggtagagggcgaattcaatggtgacaccattgaactggctattattggcgatgagaaccctgacttgctaggctacactggtattccaaccgataaaggccctagatttagaaaattaacttctcaagaaataaatgatagattagaagcattatgatgttataattatccccgccaatcacccatctcactcaacttatccaaaagaaagccaattgtgtatataacttacataa

SEQ ID NO: 2333 - DNA, 2055 bp, Saccharomyces cerevisiae
gaaagcttagtaagtctcatcgtagttgatgggccaaagacatttgtacttgtttcatcagattcttacatcacccatttccatgattatttcacggatttcattagtaattgcatttttgtatccctagttccttttctcccgccttgccgtcgaattgaaaaaaaaaatggaaatgaggacatcttccattgatatccaggacaaagcaagagtagaagtaactattagcaaggagaattccaaaaatagtgaacttcaaggtaagcagatctatagtttcaatatctgattttctgcttttcaaaacttaaaattcattagaaggtaaaacaagaacccgtaaaattaaagttaccgatattatcaggtttttcaccccatgtctactatcccatttagaaagaactatgtgttcaaaaactgggccggaatttattctgcaaaaccagaacgttacttccaaccaagttcaattgatgaggttgtcgagttagtaaagagtgccaggctagctgaaaaaagcttagttactgttggttcgggccattctcctagtaacatgtgcgttactgatgaatggcttgttaacttagacagattggacaaagtacaaaagtttgttgaatatcctgagttacattatgccgatgtcacagttgatgccggtatgaggctttaccaattgaatgaatttttgggtgcgaaaggttactctatccaaaatttaggctctatctcagaacaaagtgttgctggcataatctctactggtagtcatggttcctcaccttatcacggtttgatttcttctcaatacgtaaacttgactattgttaatggtaagggcgaattgaagttcttggatgctgaaaacgatccagaagtctttaaagctgctttactttcagttggaaaaattggtatcattgtctctgctactatcagggttgttcccggcttcaatattaaatccactcaagaagtgattacttttgaaaaccttttgaagcaatgggataccctatggacttcatctgaatttatcagagtttggtggtacccttatactagaaaatgtgttctatggaggggtaacaaaactacagatgcccaaaatggtccagccaagtcatggtggggtaccaagctgggtagatttttctacgaaactctattatggatctctaccaaaatctatgcgccattaaccccatttgtggaaaagttcgttttcaacaggcaatacgggaaattggagaagagctctactggtgatgttaatgttaccgattctatcagcggatttaatatggactgtttgttttcacaatttgttgatgaatgggggtgccctatggataatggtttggaagtcttacgttcattggatcattctattgcgcaggctgccataaacaaagaattttatgtccacgtgcctatggaagtccgttgctcaaatactacattaccttctgaacccttggatactagcaagagaacaaacaccagtcccggtcccgtttatggcaatgtgtgccgcccattcctggataacacaccatcccattgcagatttgctccgttggaaaatgttaccaacagtcagttgacgttgtacataaatgctaccatttataggccgtttggctgtaatactccaattcataaatggtttaccctttttgaaaatactatgatggtagcgggaggtaagccacattgggccaagaacttcctaggctcaaccactctagctgctggaccagtgaaaaaggatactgattacgatgactttgaaatgagggggatggcattgaaggttgaagaatggtatggcgaggatttgaaaaagttccggaaaataagaaaggagcaagatcccgataatgtattcttggcaaacaaacagtgggctatcataaatggtattatagatcctagtgagttgtccgactagtctctttttgtctcaataatctctatattttactaaaaaagaatatatatatatatatatatagcagtgtgatgactgttcatgtacattct

SEQ ID NO: 2334 - DNA, 1524 bp, Saccharomyces cerevisiae
agatctgtaaacttacaactgcaaacaaacaatgagagaagttattagtattaatgtcggtcaagctggttgtcagattggtaatgcctgttgggaattatattcccttgagcacggtattaagccggatggacatctagaagatggcctttcaaagccgaagggaggagaagagggtttctccacgtttttccatgaaaccggctacggtaagttcgttccaagggctatttacgtggatttagagcccaacgttattgacgaagtccgtaacggtccttacaaggacttgttccatccagaacagttgatcagtggtaaggaggacgcggctaataattatgcaagaggccattacaccgttggtagagaaattttgggcgatgttctggataggattagaaaactggcagaccaatgtgatgggttacaagggttcttgtttacccattctcttggtggtggtactggttccggtctagggtccttactgttggaagaactatccgctgaatacggtaagaaatccaagctggaatttgccgtataccctgctccacaagtgtctacttctgtggttgagccttacaacacagttttaactacacatactacattggaacatgcagattgtactttcatggtcgataatgaggctatttacgacatgtgcaaaagaaacttggatatcccaagaccaagctttgcaaacttaaacaacctaattgctcaagtggtatcatctgttacagcatcattgagattcgacggttcattaaatgtagatttgaacgaatttcaaaccaatttggttccatatccaagaattcatttccccttagtttcatattctccagtcttatccaaatcaaaggcattccatgagtccaactctgtgtcagaaattacaaacgcttgttttgaacctggtaaccagatggtcaagtgtgatccaagagatggtaaatacatggctacttgtctgttatacaggggtgatgtggtaacaagagatgttcaaagagctgtcgagcaggtgaaaaacaagaagaccgtccaattggttgattggtgtccaactggtttcaagatcggtatttgctacgaacctccaactgccacaccaaactcacaattggccactgtggatagggccgtctgtatgttgtcaaataccacatccattgctgaggcttggaagagaatcgatagaaaattcgatttaatgtatgccaaacgtgctttcgtccactggtatgtcggtgaaggtatggaagaaggtgaattcaccgaagctagagaagatttggctgctttagaaagagattacatcgaagtgggtgccgactcatacgctgaggaagaggaattttaaggttcactctcgcccccaacctccttatcctttctatatttcaagtatattgtaaaaaaaaaaattccccctactgttatatctctttggtgatatcttatctataatctacttattatatttctctaatatctatgtacaaaaaataa

SEQ ID NO: 2335 - DNA, 364 bp, Saccharomyces cerevisiae
cgttagtttaacatacgacgacagattaattgattggattgtactgccatgttgaaaagattccctacccctatccttaaagtatactggcctttctttgtggctggcgccgcagtgtattatggtatgagtaaagctgctgacctttcttctaacacgaaggaatttatcaatgatccaagaaatcccagattcgcaaaaggtggaaagtttgtggaagttgattgaataatgctaggacaaacacatttgtaggtgatgatgacagctactagtactactacatatgtttgtatatagaaatatattcgtaatgcgtgaaaaaattaaatatcgaaaaaaaaaacataaaaagtgaaattag

SEQ ID NO: 2336 - DNA, 3391 bp, Saccharomyces cerevisiae
gtcaggaaaagactaagggctggaacatagtgtatcattgtctaattgttgatacaaagtagataaatacataaaacaagcatgccgccgctattcaagggactgaaacagatggcaaagccaattgcctatgtttcaagattttcggcgaaacgaccaattcatataatacttttttctctaatcatatccgcattcgcttatctatccgtcattcagtattacttcaatggttggcaactagattcaaatagtgtttttgaaactgctccaaataaagactccaacactctatttcaagaatgttcccattactacagagattcctctctagatggttgggtatcaatcaccgcgcatgaagctagtgagttaccagccccacaccattactatctattaaacctgaacttcaatagtcctaatgaaactgactccattccagaactagctaacacggtttttgagaaagataatacaaaatatattctgcaagaagatctcagtgtttccaaagaaatttcttctactgatggaacgaaatggaggttaagaagtgacagaaaaagtcttttcgacgtaaagacgttagcatattctctctacgatgtattttcagaaaatgtaacccaagcagacccgtttgacgtccttattatggttactgcctacctaatgatgttctacaccatattcggcctcttcaatgacatgaggaagaccgggtcaaatttttggttgagcgcctctacagtggtcaattctgcatcatcacttttcttagcattgtatgtcacccaatgtattctaggcaaagaagtttccgcattaactctttttgaaggtttgcctttcattgtagttgttgttggtttcaagcacaaaatcaagattgcccagtatgccctggagaaatttgaaagagtcggtttatctaaaaggattactaccgatgaaatcgtttttgaatccgtgagcgaagagggtggtcgtttgattcaagaccatttgctttgtatttttgcctttatcggatgctctatgtatgctcaccaattgaagactttgacaaacttctgcatattatcagcatttatcctaatttttgaattgattttaactcctacattttattctgctatcttagcgcttagactggaaatgaatgttatccacagatctactattatcaagcaaacattagaagaagacggtgttgttccatctacagcaagaatcatttctaaagcagaaaagaaatccgtatcttctttcttaaatctcagtgtggttgtcattatcatgaaactctctgtcatactgttgtttgtcttcatcaacttttataactttggtgcaaattgggtcaatgatgccttcaattcattgtacttcgataaggaacgtgtttctctaccagattttattacctcgaatgcctctgaaaactttaaagagcaagctattgttagtgtcaccccattattatattacaaacccattaagtcctaccaacgcattgaggatatggttcttctattgcttcgtaatgtcagtgttgccattcgtgataggttcgtcagtaaattagttctttccgccttagtatgcagtgctgtcatcaatgtgtatttattgaatgctgctagaattcataccagttatactgcagaccaattggtgaaaactgaagtcaccaagaagtcttttactgctcctgtacaaaaggcttctacaccagttttaaccaataaaacagtcatttctggatcgaaagtcaaaagtttatcatctgcgcaatcgagctcatcaggaccttcatcatctagtgaggaagatgattcccgcgatattgaaagcttggataagaaaatacgtcctttagaagaattagaagcattattaagtagtggaaatacaaaacaattgaagaacaaagaggtcgctgccttggttattcacggtaagttacctttgtacgctttggagaaaaaattaggtgatactacgagagcggttgcggtacgtaggaaggctctttcaattttggcagaagctcctgtattagcatctgatcgtttaccatataaaaattatgactacgaccgcgtatttggcgcttgttgtgaaaatgttataggttacatgcctttgcccgttggtgttataggccccttggttatcgatggtacatcttatcatataccaatggcaactacagagggttgtttggtagcttctgccatgcgtggctgtaaggcaatcaatgctggcggtggtgcaacaactgttttaactaaggatggtatgacaagaggcccagtagtccgtttcccaactttgaaaagatctggtgcctgtaagatatggttagactcagaagagggacaaaacgcaattaaaaaagcttttaactctacatcaagatttgcacgtctgcaacatattcaaacttgtctagcaggagatttactcttcatgagatttagaacaactactggtgacgcaatgggtatgaatatgatttctaaaggtgtcgaatactcattaaagcaaatggtagaagagtatggctgggaagatatggaggttgtctccgtttctggtaactactgtaccgacaaaaaaccagctgccatcaactggatcgaaggtcgtggtaagagtgtcgtcgcagaagctactattcctggtgatgttgtcagaaaagtgttaaaaagtgatgtttccgcattggttgagttgaacattgctaagaatttggttggatctgcaatggctgggtctgttggtggatttaacgcacatgcagctaatttagtgacagctgttttcttggcattaggacaagatcctgcacaaaatgttgaaagttccaactgtataacattgatgaaagaagtggacggtgatttgagaatttccgtatccatgccatccatcgaagtaggtaccatcggtggtggtactgttctagaaccacaaggtgccatgttggacttattaggtgtaagaggcccgcatgctaccgctcctggtaccaacgcacgtcaattagcaagaatagttgcctgtgccgtcttggcaggtgaattatccttatgtgctgccctagcagccggccatttggttcaaagtcatatgacccacaacaggaaacctgctgaaccaacaaaacctaacaatttggacgccactgatataaatcgtttgaaagatgggtccgtcacctgcattaaatcctaaacttagtcatacgtcattggtattctcttgaaaaagaagcacaacagcaccatgtgttacgtaaaatatttactttatagtttgtacgtcataatttcttccatattacaagttcgtgcatatatagaaagaattctgttgttgt

SEQ ID NO: 2337 - DNA, 1361 bp, Saccharomyces cerevisiae
agttcatacataattgaaagcaagcatccaaccagcccaatatgtctgatttgttaccactagctacctacagtttgaatgttgaaccttataccccggttccagcaatcgacgtcacgatgcccatcaccgttcgtattactatggctgctttgaacccggaagccatcgatgaagagaacaaaccatcgactttaagaattatcaaaagaaacccggactttgaagatgatgattttttaggtggtgattttgatgaagacgaaatagacgaagaatcctctgaggaagaagaagaggaaaaaacccaaaagaaaaagaagagtaaaggcaagaaggctgaaagtgaaagtgaggatgatgaagaagacgatgacgaggacgatgagttccaagaatccgtccttttgactttatctccggaagcccaataccaacaatctttggacttgaccattactccagaagaagaagtccaattcattgtcactggttcttacgctatctccttgagcggtaactatgttaagcatccatttgatactccaatgggagtcgaaggtgaagacgaagatgaagacgctgacatctatgacagtgaagactacgacttgaccccagatgaggatgaaattattggcgacgacatggacgacttggatgacgaagaggaagaagaagttcgtattgaagaagtccaagaagaagatgaagaagataatgatggagaagaagaacaagaagaagaagaagaagaagaacaaaaagaagaagttaagccagaacctaagaaaagcaaaaaggaaaaaaagagaaagcacgaagagaaagaagaagaaaagaaagctaaaaaagtaaagaaggtcgaattcaagaaggacttagaggagggtccaacaaaacccaaaagcaaaaaggaacaagataagcataaaccaaagagtaaggttttggaaggcggcatagtaatcgaagaccgtactatcggtgatggcccacaggctaagagaggtgccagagtaggcatgaggtacattggtaagttaaagaacggtaaagttttcgacaagaacaccagcggtaaaccatttgcattcaaacttggccgtggtgaagttatcaaaggctgggacattggtgttgccggtatgtctgttggtggcgaacgtagaatcatcattccagcaccatatgcctacgggaagcaagctctgccaggtattcctgccaattccgaactgacattcgacgttaaattggtttctatgaaaaactagtacacgcgctcgtacggatagatgtttatatatattattctttttacataatattgtaaccttctgtatgtaaatccgaaaaca

SEQ ID NO: 2338 - DNA, 609 bp, Saccharomyces cerevisiae
aacaaagtaatagccatccaacgaaatgagtgcccaaaaagctccaaagtggtatccatccgaagacgtcgctgctctaaagaagaccagaaaggctgctcgcccacaaaagttgcgtgcctctctagttccaggtaccgtcttgatcttactagctggtcgtttcagaggtaagagagttgtttacttgaagcatctagaagacaacactttgttgatttctggtccattcaaggtcaatggtgttcctttgagaagagtcaatgctcgttacgtcattgctacctctactaaggtttctgtcgaaggtgtcaacgttgaaaaattcaatgtcgaatactttgctaaggaaaaattgactaagaaggaaaagaaggaagctaacttgttcccagaacaacaaaacaaggaaatcaaggctgaacgtgttgaagaccaaaaggttgtcgacaaggctttgattgctgaaatcaagaagactccattattgaagcaatacttgtctgcttctttctctttgaagaacggtgacaagccacacatgttgaaattttaaatataattattttaacgaacttctataataatatatatgcaggtaaaattata

SEQ ID NO: 2339 - DNA, 4931 bp, Saccharomyces cerevisiae
ttcactttgatagacaactttgctttttagcgttacttaatttaatcagttttcttcttaacaatataaagagcatcattagctagctttgtttattgacatacgcaatattgctagaaagaaaataagtagagctacgcattgaaagtcaagaaaaatgactggcatcaaagctcaagtccatcccccacctgatagtaccctatttcatgaggaggagaagaagaaagtaggaggcaatttacctcaaaaggtcataaatcaacaagaaaggggttctgatcacgctccatcgggtcaccatcaataccaccaactgattaaccatgacgcaaatgacacaaagacctcaaattcagtttctgatgtgtctaaaggtcagaaaactgctgactccaacccggaaggtaagaaacagtcatcaaaagacatatttgttgcctccagcgctcaaaaaaccaatcaattgcccggtcccaacccacagggaagcataggagccgtgccattggaaggtttacgtccgaaggaattcagatcagcaccatctaggaagccaaataaattcgacacttcgattactaagcctggcgtcttagacgacttaggcaaacttgatgaaaaggatattaaggaaaaatttcacctagattccgacgacaagttatttccatggcaaaatgttggtgagttccatgcttcaggaaagggttcgccaaatacaaagatgtccagggttataaaagcttacattctggaaaatttttataacgattggtactgtaatatagccaccgttcttggaacttgtttcttctcatggttatttgcttacattgggttttcatggtggtctatgatatttatcttcttgggaactgcgaccgtttacaacgcagaatatacaagattcaacagaaatatcagagatgacttgaaaagagttacagtcgaagaaaccttgtcggatcgcgttgaatccactacgtggttgaattcatttttatcaaaattttgggtgatttacatgccagttttatctcaacaagtcaaagataacgttaaccctcaactggcaggtgttgctccaggttacggtatcgatgcgttagctatcgatgaattcactctgggctctaaagctcccaccataaaaggtattaaatcgtacaccaagactggtaaaaacactgttgaaatggattggtcatttgcattcaccccaagcgatgtctcggatatgacagctactgaagctagggagaagatcaatccaaaaatatctctgggtgtcacgttaggaaaaagttttgtctctaaaacaatgcctattttggttgaagacattaacgttgctggtaaaatgcgtattaaagttgaatttggtaaagctttcccaaatatcaaaattgtttctttacaacttttagaaccacctttgattgatttcgcactgaaaccaattggtggtgatactttaggtcttgatgttatgtcattcttgcctggtttgaagagttttgttaaaaacattatcaactccaatatagggcctatgctattccctccgaaccatttggatattaatgttgaagacattatggctgctcaatcaaaagaagctattggtgtccttgccgtaaccattgcttctgccgactctttgaaaggctcagatttcattaccaatactgtcgatccttatattgttatgactaccgaagatgctgtgcctggtacagatgaagaagtgcgtacatctatcaaatcaaatgttaaaaatccacgttggaacgaaaccaaatatctattattaaacaccttagagcaaaagttaaacttaaagtgctttgacttcaatgatgtaagaaaagataccgtaattggtgatcttcaacttgacttggcagatttactacaaaaccctgttttggataatcaaactgctgaattaagatccggtacaaaatcaaaaggtattttacattattccttacactggttccctgtgaaagaagataaatcagaggaaaaagcagttgagcgtgccgaagctaaggccaagggcaagaaagaagatgaaaacgaggacactactgaaaaagaagaagacgagaatgaagaaagttctcaaactgatgtcgggattgccaagatcactttacaaaaggtcaaatatctggatacaaccagttctatgaccggtagcttgagcccatgtgctgaattattcattgatggacaaaaagtaaagagctatagaactttgagacgtatcaatgagccatcttggaatgagaccatcgaagttttggttccatcaaaatctaactctaagtttgtcctaaaaatattcgatgacagaatgaatggtaaggcgctgatctgtgagtattcatcttctttagatgatataatgactactttagacactgctcaagagtttgttaaaggctcaccacaaggtgacatttatttggatgtttcttggaaatcaattgaaatgaccggagcttttgccgctgcaaactctgtaagcgaacctattggttgtattaagctagacgttaaggatgccattatcaagggtgacttatccggtgtaggggatgttgatccatattacaccgtatcgttgaatagacgtgttctttacaagtccatatatcattctgatacggatcatcccatttttgacaacagcacctacgttcctatcttctctccaaatcaaattttgactctcgaatttcatgattatcaaaagatcggcaaagaccgtttcattggctctgtacaaattcctacatcaaatgttttcaaaaaagatcctaaatcaggaaaatatgttgggaataatggcaaagaagaaatttcaaaactaaaattaaaagaccacgaacacaaagttaccgaaagcattgtcaatgtttcaacaacatttatcccaatcaatctggtgtattcccctgaggagttggtgaatgttgagaaactagaaaaggagttgaaggaaaagaagaaaaaattcgaagctacccaagaagaaaacgagcaagagatggaaaaaaatccaaaggaatgggaagttgccgagatcgaagacccatttgacagcgatgaaaaaaaaataaacaggaaggccaagttatctttaaacgagttgatcaagcaaaaatctggtattttgtctatgcaaatattggaagggactttgagcccatcctctgcttacctagaaatcttagcggatgacatttcgtaccctgtattcatttgcatgaaaccatctcaaggtaaactaaactcggagatggcaaatattttcattagagatttgaattacagtaaactacattttagagtatcgaagaaacatattgccaaagattcagatgatgtcatatccgaaacttcctatagtacattgaagctactaaagcaagcttacgaagagcccatgtggttaaacttcaatgggtctaaaatgaaggtaagatttttgtacacgcccactagcgtgaaactgcctagcagtgaaagtgttgaagacactggttatttgaatataaagcttatttccggacacggtctgaagtccgcagataggaatggctattcagatccatttgttcacatctttgtcaatgataaaaaagttttcaaatcgaacattaaaaagaaaacattggatcccgtatggaacgaagatgctaaaataccaatcctttcaagaagtaagaatcaagtcatatttaatgttcttgattgggatcgtgcaggtgataatgacgacttaggccaagcttcacttgacgtttcctcattagaagttggtaaaacttacaactggaatttgaatttaaacacacaaggaagtatcaaattacaaggttcattcaacccagaatatatcaagccaagttttgatatcgtgaaaggcggtatcactgataagccgatgaaaatagccagtggtgcagcccatgcaactgttggcatagctggtactggtataggagcagcaacaggagttgccactggtggtttaaagaaaggtggtcaccttctaaaatctctaggtggcaatccaatgaaaagaagcaagagcagcaatggaaatgagtccaacggtgcaaaaaaatcatcagagaaaaaatcttttgataggagatccccaagtaatttgaatagcactagtgtaacaccaagagcttcactagactatgatccatcagtacctaacacaagttacgcgcccgttcaaagcgcatctcctgtagtcaagccaactgacaacacttctagctcaagcaacaaaaaagatacccctagtagcaactctagaggacattctcgtgcaagcagttttgcgcgtactttagctcctcatggcacttacaatggttttattaccgtggttgctgcggaaaacgttgccaagcatgttcaaattaagatctctttaactcaaggtggtagactaaaacacatatacaaaacgaaaagccaaaaagccaataatgatggtgttgccgtatttgatgaagagtgctcgttcaaggcttctcccgaagccaatttggtactgggtgcaatttcccatcaaagactatcgagggacaaagatcttggtattgctcaaatcaacttgggtgaccctcaaattcaacaagatggccaaatttctgtaaaattaggagacggtcatctgattgtaaagattaattacggtaaagacaagaatggtcaggtacctcccgtgccagaagttcctcaagaatacacgcagtaataaacagtgaaaactattcttttatacgctcaataagggcacatttggtgtgttaacaggtgtcttttctgtgtttgttataattttgcgctattattatataacgttatatttactataatatattacaacatat

SEQ ID NO: 2340 - DNA, 1087 bp, Saccharomyces cerevisiae
acttcaggagtatataatggcaggattgaagacatttgatgcgtttccaaaaactgaagaacagtacaagaagaaatccaccaagggtggcttaacatctttgttgacatatctgtttctgttgtttatagcatggaccgagtttggtgaatacttcggtggttatattgaccagcagtacgtagtggacagtcaagttagagataccgttcaaattaatatggatatatacgtcaacacgaaatgtgattggttgcaaatcaacgtcagagaccaaacaatggatcggaaacttgtattagaggaattgcaattggaagagatgccattctttattccttatgacacaaaagtcaatgatatcaatgaaattattacgccggaattggatgaaatcttaggggaagctatcccagcagaatttagagaaaaactagatactaggtcattttttgatgaaagtgatcctaacaaggcacatcttccggaattcaatgggtgccatgtatttgggtccattccggtaaatagagttagtggcgaattgcagattacagcgaagagtttaggttacgtggcttcacgcaaagcaccactggaagaattaaaatttaatcatgttattaatgagttctcttttggtgatttctatccatatattgataacccattggataacactgcacagtttaatcaggatgaacctttaactacttacgtctattacacatctgttgtgcccactcttttcaagaaattgggggcagaagtggatactaatcaatattctgttaacgattaccgctatttgtacaaagatgtcgctgctaaaggtgataaaatgccgggcatcttcttcaaatacaatttcgaaccattatccatagtagtttctgatgttcgtttaagctttatacagtttttggtcagattagtggcaatctgctcatttttggtctactgtgcttcgtggattttcacactactggatatggctcttatcaccatcatgggacctaagtggtccttgcgttatcagccagatgataaaactaagggtattttagataggtagatatgtaaaaga

SEQ ID NO: 2341 - DNA, 972 bp, Saccharomyces cerevisiae
cgagaaaaatatagatattacgtttggattttgctgtagaaattaaattgagttaagctaagatggctacaccaagcacgggagcaaacaattctatacctgcggtacgaaatcaggttgaagttcaggttggattagtaggggatgcacaagtagggaaaacatcgctgatggtgaagtacgtacagaacatatacgataaggaatacacacagacgctgggagtgaactttttgaaaagaaaagtaagcatacgctccacggatattatattttctataatggatttaggcggacaaagagaattcatcaacatgctcccaattgcgacggtagggtcttcagtgatcatatttctgtttgacctgacacgtccagagacgttgagttcaataaaggagtggtataggcaggcgtacgggctaaatgattcggcaattcctattttggtgggcacaaagtacgatttactaatagacttagacccggaatatcaggaacaaatctcgagaacgagtatgaagtatgcacaggtcatgaatgctcctcttatattctgctctactgccaaatctataaacattcaaaaaattttcaaaattgcactggcaaagatctttaatttgacattaaccatcccagaaatcaatgaaatcggcgatcctcttttgatatataagcacctaggtggccagcaacatcgacatcataacaaaagtcaggatagaaagagccataatatcaggaagccctcctcgtcgccctcatctaaggcaccatcgccgggcgttaatacatgaaaacaactatacccgcctgctaccatgtgagagttggcgttagcatattttaaatcaagctacacaatagctttaaggagatatagaaggtatgtacatccacaatatcgtatgttttggataaatgcgctactatgtaggtatatgtatgtgtatgctaggtcatgaataa

SEQ ID NO: 2342 - DNA, 5260 bp, Saccharomyces cerevisiae
acaaaactctaacgaatataaaataaacaagaaaagaatagaaaggcttggctctagtttttgcatgcgttcaatgaattgcactacgaacaacaccaacaataccggccaaaacacgaaaaacagtcttggctccagctttaattccagtaattatacttcttatagattccagacatgtctcaccgaccagattatttctgaggcgcagacgtggtcactttcatccctcttcaacttctcgtgggttgtgtcctactttgttatgggtgcctctcgtatgatcttcaggtacggttggtatctggcaactttatcgcttttaaggattccgaagtggatcttcttcaagttacaccatgttcagttcactctttccttttggctgatcctgtttgccctagccgtcatagtctttgtgacttacaccatcatgaaggagagaattctatcccagtacaagaggctgaccccggagttcttgccgctggaaaatacaggtaaatctggctccagcgccaatatcaatgcagcttccactcagtcagccaacgcgccacccgccataggttcctctaccacgggtgcaagctcgattatagactcaaaaaagcattcattgaaagatggcaacgaaaacgaaacctttctttcatcttaccttgaccaatttctcagcgccatcaaaatctttggctatctggaaaaaccagtcttccatgacctgaccaagaatatgaaaactcaaaaaatggatgagggtgagattttactgttggacagtactattgggtttgccatcgtcgttgaaggcaccctgcagttatatcatgaagtagatcattcagataaggaccatggcgatgaaactgaccacagtgacacggatggtcttgacgaccaggatagagatgaagaagacgaagaagaagatgatgacattgataactacgacaccaaatcttgttcttctaacctcatcgatgaagaagatgaatccgttggttacattcatctgaaaaatggactgggaaattttcaactgctaaatacagtcaagccaggaaacccgctgacctccctcgtgagcattttaaacttattcacgcattccatgtcctcgtatggcaacagtaactttccctctgagttatcgtcacctatagacacaacggtgtcggtcaacaatatgttctgctcatcagagcagaacttctccaacacagattccatgacaaactccaccaacagctttccaacgttcccctcttcaatgcctaaacttgtcgcccgtgcggctacagactgcacaattggtattatcccacctcaatcgtttgccaaattaaccgcaaaatacccacggtctgcttcccatatcatacagatggttctcaccaagctataccatgttacgttccaaactgctcacgactacttaggtttaacaaaggagatcatggatatcgaagttttactaaataaatccatcgtttatgaattgccttattatttgaaagaggccgttattcgtaagtttaaaactgtagataagtcgagcggatcggctgatttagaaccgaaacccaaaaatagtaatgcttcctctaaattgaagaaaccgcccaaagcgaagccatctgatggtatcattcaatcgcttaagattgctaacgccaacgctaacacaagttcgaattccctttcactgaaaccagaattcacccaccatccaagttcgagacatgtcgtactgggttcaagagaccaatttaatcctggtgatttactgtcaaatgtcccactgtctagaactatggatattctgtcacccaacccaatccataataacaaccgcaataaatcaaacggtattaacacttctacctctaaccaacataagcgatcttctaggagtagcagtaacaatgcttccgtacactctaagaagttttcttctttgtccccagaattgcgcaacgcacaacttagtacatcgcccttgtccttggataatacttctgttcatgaccatatccacccaagtcccgttcatttgaagggacgggtctctccaagacctaatttactgcccacaacatccttttctgctgcccaggaagaaaccgaggactctgctttaagaatggctttagttgaggcaatgttaacatacttgggtgtaaacaaaagcaatatgtccgtttcatcttcttcgatagcaaatatgtcttctttaaactctcctcaacttaatgaaatgtatagccgccgtccaagtaacgcaagttttctgatgtcccctcactgtacaccatctgacatttccgtagcttcatcatttgcctctcctcaaactcaaccgacaatgttaagaatcctacccaaagaatacactatcagcaataaaaggcataataaaagtaaaagccaggacaaaaaaaaacctagagcttacaaagaggagttgacacccaatttggatttcgaagatgtcaagaaagactttgcacaaggcattcagttgaagttctttaaaaagggcaccacaattgttgagcagaacgctcgtggtaaaggcctattctatatcatttccgggaaagttaatgtgacaacaaattcgtcctcgtcagtagtatcatcaatgtctaaaccagagcaggtttcagcccaaagttcacacaagggtgaaaatcctcatcatactcaacatttgttatactctgtaggatctggtggtattgtgggctacttgtcctctctaattggttacaaatcatttgttaatatcgttgccaagagcgatgtctatgttggatttttatctagtgcaaccttagaaagattgtttgataaatatttcctaatctacttacggatttctgattcattaaccaaattgctatcttcaaggttattaaagctcgaccatgctttagaatgggttcacttgagggcttctgaaactctattttcacaaggtgactcggctaacggtatttatgttgtcctgaatggtagactaaggcagctacaacagcagtcattgtcaaactccaatacaagttccgaagaagttgaaactcagaacattattctaggagaactggcccagggggagagttttggtgaagttgaagtgcttaccgctatgaatagatattcaacgatagtggcagtgagggattctgaattagcgagaattccgagaacattattcgaactattagctcttgaacatccatctatcatgattagagtttccagattagttgctaaaaaaattgtcggagatagaactgttccagcattaacaggcgatccattatctataaaggaaaacgacttcacttctttaatacctccaacgaaagcgtcttactctagctctttaagtcataaaccccaaaatattacttctggcacaattacttttagaaccatcactatcttaccaattaccagtggactacctgtagaagcatttgctatgaagttagtgcaagctttcaaacaggtaggaaggaccacgattggtttaaatcaaagaactaccctaacacatttaggtcgtcatgcatttgacagattgtccaaattaaaacaaagtggttactttgctgaactagaagaaatgtaccagactgttgtttatatatcagatacaccagttaaatctaattggacaagaacctgtattgcgcaaggtgattgtattctcttactagcagatgctagatctccatcagccgaaataggagaatatgaaaagttattactaaattcaaagactaccgcaaggaccgagttaattcttctacaccctgaaaggtatgtggaaccaggactaacccataagtggttacgctataggccatgggttcattcgcatcatcacattcaatttagtttgacaggaacaaccttgatgaacgaaggcaaaatgcacgttttgaataatggtgccttggcattaatggataagttgattcaaacagaattcagtagaaaaactcaacagaatatatcaaaactacttccagattctatcaagaacaccgtagaaaacttttcttcaagattcatgaaaagtaaaagacaatattacacaccagttcataggcataaaaatgattttctaagattggctagaattctttctggacaagctattggacttgtcctcggaggaggaggtgcgagaggtattagtcatttgggtgtcattcaagctattgaagaacaaggtattccggtcgacgttattggaggaacatcgattggttcctttgttggcggtttgtacgcgaaggattatgatttggtgccaatttacggccgcgtgaagaagtttgctggtcgaatttcctctatatggagaatgttaacagatttaacctggccggttacttcttatactactggtcacgaatttaatagaggtatttggaaaactttcggggatacaagaattgaagacttctggatccagtattattgtaattctactaatataaccgattcggttcaagaaatacattcctttggttatgcgtggaggtacatcagagcttcgatgtctcttgctggtcttttacctcctttggaagagaacgggtctatgttactggatggtggttatgttgataatttaccagtaactgagatgagagcgcgtggttgccaaactatatttgcagtagatgtaggttctgcagatgatagaacgcctatggaatatggtgactccctaaatgggttttggatcattttcaatagatggaatccattttcttctcatccaaacatacccaatatggcagagattcaagttagattgggttacgtcgcatcagtaaatgctttagagaaagcgaaaaatacaccaggtgtcgtttatgtgagaccacctattgaagaatatgccacattagactttagcaagttcgaagaaatttatcatgtgggtgtagactatggtcgtatctttttgcaagggcttattgacgacgacaagatgccatatatacctggttcacaagaaaccactttgaattctcaagttcctgagtttttattacatagaagaaatagtatttgatagatttctatcttccaacgccttggtgaccgttttttgtagatagatttaggtattgcattgttttttactgtattatttatcgttctaaatatttgtgttttatactgtaaatatctctaatatttcaatcattacctttcaagctcctttaaa

SEQ ID NO: 2343 - DNA, 1935 bp, Saccharomyces cerevisiae
agccctaatgtgaaaaactctttgccgtggcactttttcgttccttttttttgctcttcgagatgctgaaaaaaaaaaaaaaaaaaaaaaaaactgaaaaagccatataaatatcagttgagaatccatccgattcaaatcatgcttggctcatcgcattttttcatctctttttctcaaactcttgggcttaaatttttttacgaaaaaatggtggcttttacattttctctggtcttctttgctgcttgaaccaaaggatattggaccaattccatagctttgaagaaacctaacaaacattttacgatgagtgctgctccattggattacaaaaaggctttagaacatttgaagacatacagttccaaggacggtctttctgtccaggaattgatggactccacaactagaggtgggttgacctacaatgattttttggtcttaccaggcttggtcaatttcccatcttctgctgtcagtttgcaaaccaaattgaccaagaaaatcactttgaacactccttttgtctcttctcctatggacacagtcactgaagctgatatggctatttatatggctttattgggtggtattggtttcatccatcacaactgtactccaaaggaacaggcttccatggtcaagaaagttaaaatgtttgaaaacggtttcatcaattctccaatagtaatttctccaaccaccactgttggtgaagttaaggttatgaagagaaagtttggtttctctggcttcccagttactgaagacggtaagtgtccaggtaagttagttgggttagtcacctctcgtgatatacaattcttagaagatgattctttggttgtttctgaagtcatgactaaaaatccagttactggcatcaagggtattactttgaaagaaggtaatgaaatcctaaaacaaaccaagaaaggtaaattgcttatcgttgatgataacggtaacctcgtttccatgttgtcaagagcggatttgatgaagaatcaaaactacccgttagcttctaaatccgccaccaccaagcaattgctatgtggtgctgcaattggtactatcgaagctgataaggaaagattaagactattagtcgaagcaggtttggatgttgttatcttagattcctctcaaggtaactctgttttccaattgaacatgatcaaatggattaaagaaactttcccagatttggaaatcattgctggtaacgttgccaccagagaacaagctgctaacttgattgctgccggtgccgatggtttaagaattggtatgggttctgggtctatttgtatcactcaagaagttatggcttgtggtagaccacaaggtacagctgtctacaacgtttgtcaatttgctaaccaatttggcgttccatgtatggctgatggtggtgtccaaaacattggccacatcaccaaggctttggcccttggttcctccaccgtcatgatgggtggtatgttagctggtactaccgagtcaccaggtgaatacttctacaaggatggtaagagattgaaggcttatcgtggtatggggtccattgacgccatgcaaaagaccggtaacaagggtaatgcctctacttctcgttatttctctgagtcagacagtgtcttggttgcacaaggtgtttctggggctgtcgtagacaaaggttccatcaagaagtttattccatatttgtacaacggtttacaacattcttgtcaagacattggttgcgaatctctaacttcattgaaagagaatgttcaaaatggtgaagttagatttgaattcagaaccgcttctgctcaattagaaggtggtgtccataatttgcactcctatgaaaaacgtctatacaattgagtaagcatccatagatatttaaaagtttatttttgcatataaatatacctt

SEQ ID NO: 2344 - DNA, 1622 bp, Saccharomyces cerevisiae
ctgattatactcataactgcattttcatcacttccacgatcacttgaagttgttacagcgagtgtttataccttcaattctcgtgtcacattttgctatgaataggactgtctttttggcatttgtatttggatggtatttctgttcaatagctctctccatatacaatagatggatgttcgatccgaaggacggattgggtattgggtatcccgtgttggtgacaacattccatcaggctactttatggttactatccggcatatacattaagctcaggcataagccagtgaaaaacgttttaagaaagaataatggttttaactggagtttttttctaaaatttttactccctacggcagtcgcttctgcaggtgatatcgggctcagtaacgtttccttccagtatgttcccttgacaatttatacaattatcaaatcttcgagcatagcttttgtccttttattcggctgtatcttcaagctagaaaagtttcattggaagttggcactttcagtaataattatgtttgttggtgtagcattaatggttttcaaaccaagcgattccaccagtaccaaaaacgaccaagccttggtcatttttggcagctttcttgtcctagcaagtagctgtctttctgggttaaggtgggtttatacgcagttgatgcttaggaacaacccaattcaaactaacaccgctgcagcagtagaggaatctgatggtgcccttttcacggaaaatgaagataatgtcgataatgaacctgttgttaacctcgccaataacaaaatgctggagaattttggagaatccaagcctcacccaattcatacaatccaccagttagctcctataatgggcattactctgttgcttacctcgctacttgtggaaaaaccatttcctggtatattcagctctagcatatttaggcttgatacgagcaatggcggtgtcggcacggaaactaccgtcctatccattgtgaggggtattgttttgttaattttacctggttttgcagtctttttgttgacaatttgtgagtttagtattttggagcaaacgcccgtgctgaccgtatctattgtgggtatagtgaaggaacttttgacggtaatatttggtataattattctttctgaaagattaagtggtttttacaattggttaggaatgcttattattatggcagatgtatgctattataattacttcagatataagcaagatctattacaaaaatatcattcagtttcgacacaagataatcgtaacgagttaaagggatttcaagacttcgaacagttaggaagcaagaaaatcgcaccatattctattagtgtcgacctaacaaatcaagagtatgagcttgatatgattgctcaaaacgttagtcgttcatcccagcaggtctgagagcgatatagtaagagagagaaagaataaaggcaaaaatttaaaacatgtatacagcatacttaaaagtcctctaacaggacataagcaaagcacatgggaatagacaatacatccgcacataattaaaaatattttactagatagattttatacgaaggttcttcacactttttcatatatactttattgacag

SEQ ID NO: 2345 - DNA, 2594 bp, Saccharomyces cerevisiae
gtcaattatcggatattaatagtatttttattatagtctccctgctatagccaattttgattcagcaaaactcgattgaactgctagtacgccagattaataaattatataacaaataaaaagggggcattctaaaaaaaattatggacaatcaggctacacagaggcttaacgacctttctctagaaccagctccttcacacgatgaacaagatggttcaggactagtcattgacatagatcaaagaaagattggtgatgaacaagctggtgtcgtagtggatgatgagacaccccccttagagcagcaagattcacacgaaagtttagctgctgattctcggaatgctaatttctcgtatcacgagaatcagcagttgttggaaaatggcaccaaacagttggccctagatgagcatgattctcactctgccatcttggagcaaccatcgcattctaccaattgtagctcttccaacatagcagcgatgaataagggccatgactcggcagaccatgcatctcaaaattccgggggtaaaccgaggaccttgtctgctagtgctcagcatatcttgccagagacgctcaagtcatttgccggcgctccggtagtgaataagcaggtacgtacctctgcctcctataaaatgggaatgttggctgatgatgcttcacagcagtttcttgatgatccctcttccgagttgattgacttgtattccaaagtggcagagtgtagaaatttgagagccaaatatcagaccatatctgtgcaaaacgatgatcaaaacccaaaaaataagccaggctgggtagtctatccaccaccacctaaaccttcatacaactcagacactaagactgttgtgccagtaacaaacaagccggatgcggaagttttcgattttacgaaatgtgaaattcctggtgaggatccagattgggaatttaccctcaacgatgacgactcgtacgtggtacacagatcaggtaagacggatgagttaattgctcaaatccctacccttcgtgactactatctggatctagaaaaaatgatttccatctcatcagacggtcccgctaaatcatttgcttatagaaggctgcaatacctagaagcacgctggaatctttactatctcttgaacgaatatcaagaaactagcgtttccaaaagaaacccacacagggatttttataatgttaggaaagtggacactcacgttcaccattctgcttgtatgaaccaaaagcacttattacgtttcattaaacacaaattgagacattccaaagatgaaaaggttattttcagggacgggaaactactaactttagacgaagtattccgttctttgcatttgactggatatgatttatccatcgatactttagatatgcatgcacataaggatacattccacagattcgataaattcaacttaaaatataaccctatcggtgaatctcgtctcagagaaatttttttgaagacaaacaactacatcaagggtacctacttggctgacattaccaaacaagtcatattcgatttagagaattcaaaataccaaaactgtgagtatagaatttctgtttatggcaggtctctcgatgaatgggataaactagctagctgggtgattgacaacaaagttatttcccataatgttcgttggttagtccaaattccgaggttatatgatatttacaagaaaactggcattgttcaaagcttccaggacatctgtaagaatctgtttcagccactatttgaagtgaccaaaaatcctcagtctcatccaaaattgcatgtatttttacagagagtaattgggtttgattctgtcgatgatgaatccaaggttgatcgccgctttcataggaaatatcccaagccatcactctgggaggctcctcaaaaccctccttattcctattacctgtactatttgtattcaaatgtcgcgtctttgaatcaatggagggctaagagagggtttaacactttggttttgagaccacattgtggtgaagccggtgaccccgagcatctcgtttcagcatatctattggcacatggtatatcacatggtattttattgaggaaagttccatttgttcaatacttatactatttagatcaggttggtatcgcaatgtcacccctttctaataacgcattatttttgacctatgataaaaacccatttccgagatactttaaaagaggtttgaatgtctcactatccacagatgatcctttacaattctcatataccagagaaccattaatcgaagaatactcagttgcagcacaaatttataaattgtctaatgtagatatgtgtgaattggcaagaaattccgtgttgcaaagtgggtgggaagcacaaatcaaaaaacattggatagggaaagattttgacaagagtggtgttgaaggtaacgatgtggttagaacaaatgttcctgatattagaattaactacagatacgatacattatcaactgaactggaattagttaatcattttgccaatttcaagagaaccattgaagaaaagtgatggttatacgcgcacatg

SEQ ID NO: 2346 - DNA, 1752 bp, Saccharomyces cerevisiae
actgctgaaggttctggtggctttggtgtgttgttgatgaatgaaattatggatatggatgagaagaagcccgttttcggtaaccattccgaggacatacagaccaaattggacaagaaattaggacctgagtatatctccaagagagttgggtttggaacaagcaggattgcatacatcgaaggttggagagtaattaatcttgctaatcaaatctttggatataatggctggtctacggaggtaaaaagtgtagttatcgattttttggatgagcgacagggaaagtttagcatagggtgtactgcaattgttcgtgttacgttgactagcgggacttatagggaagatattgggtatggtaccgtggagaacgaaagacggaaacctgccgctttcgaaagggccaagaaatctgccgttacggatgccttgaaaagatctttgagagggtttggtaatgctctaggaaattgtctttacgataaagattttctggcaaagatcgataaggtgaagttcgatccgccagattttgacgaaaacaatttgtttaggccaacggatgaaatcagcgaaagctcaagaacgaatactttgcatgaaaatcaagaacaacaacaatacccgaataaaagaaggcaattgactaaagttacaaataccaatcccgactcgacgaagaacctggtgaaaatagaaaatacagtaagtcgaggtaccccaatgatggccgcacctgctgaggctaacagtaaaaacagcagtaataaagatactgatctcaaatctctcgatgcttccaaacaggatcaagatgaccttctcgatgattctcttatgtttagcgatgattttcaagacgacgacttgataaatatgggcaacacaaacagtaatgttttaacgacagagaaggatcccgttgtagctaagcaaagcccaactgctagctcaaacccagaggcagaacaaatcacctttgttacagctaaggctgcaacttccgtacaaaatgaacgttatattggtgaagagagcatttttgatcccaaataccaggcacaatccattaggcacaccgttgatcagactacgtccaagcatattccagcgagtgtgctaaaagacaaaacgatgaccaccgcgagggattctgtctatgaaaaatttgcaccaaagggaaaacaattgagcatgaagaacaatgataaagaactggggcctcatatgctagaaggggctgggaatcaagtaccgcgtgaaaccacaccaattaaaacgaacgctacagcttttccgcctgcagctgctccacggtttgcgccgccttctaaggtagtacatcctaatggaaatggtgcagtgccagccgttccgcaacaaagatcgacacgaagagaagttggaagaccaaagatcaatcccctgcatgcacgcaagcctacttgaaacgcttcctggccgaaacaaataaaaaatttgcatcattatttattactccaaaatcctctagttactctttcaattctgattttatttgtatttcttcctatatcgtctagtttttctttcctccatgtgtcgtattaatatttactttaaatcgaataaaaaattcttattattttacaagtcattttcaggattagattcattataactttacaaaagtattacataaagaattatataacagatattaggataaccgtataaatagaataaactatacaaatatggcaactcgga

SEQ ID NO: 2347 - DNA, 644 bp, Saccharomyces cerevisiae
gagcagaaagtggtaaagatgtctttagttgtacaagaacaaggttccttccaacacattttacgtttgttgaacaccaatgtcgatggtaacattaaaattgtttacgctttgaccactattaagggtgttggtcgtcgttactccaacttggtctgtaagaaggctgatgttgatttgcacaagagagctggtgaattgacccaagaagaattggaaagaattgtccaaatcatgcaaaacccaactcattacaagatcccagcctggttcttaaaccgtcaaaacgacattactgatggtaaggactaccacactttggctaacaacgtcgaatccaagttgagagatgacttggaaagattaaagaagatcagagcccaccgtggtattagacacttctggggtttacgtgttagaggtcaacacaccaagaccactggtagaagaagagcttaaatcaattaaggaaattatcagtaataattgtacgctattttcgtttttattatctttattttctttttttattcttcaaaggagaaagtactacacgtgttttcagaccaatgtgtgtttaatcaactttttattctatgtataacatataagcaaaaaaagatataatataattaagttttata

SEQ ID NO: 2348 - DNA, 1923 bp, Saccharomyces cerevisiae
tatgaagataattgccggcaaatggtgattgtagtggtagtctgagtatggatggtgcgttgataaattccgttttatacgtgagtccacgcaatggtgcacattattttgttgaactcactgagaaacatctattggcgtttgagatgctcaattccatgtgtctcttagaaaattatgatcatgtgctgttgtttctggagtgccagttcggcaaatctcacaatttggctgttatcccgttcgatatcatattagttcttttcacgttatcgactttatctgaatattataaggagccgatattgagggcaaatgatccatataacacgtccagggaaactttaagtaggagagctttgaaactattgcagaaatatctggcgattctgaaagagtttgattctgagcaatacaatttgtatgacttggagttgttgcgatgccagtttttcttggcaatcgatacgttgacaccaaaaaagcaaaagtggggtttcgatagatttaggagaacgaaatctgaaagtggtgtaacatataggcaaaatgctagtgtagatcccgagttggatcaggctaaaacttttaaaaatccttacaggtcgtatattagttgtcttgagcaaagaaataccatattgggcaatcgcttattgaatttgaaactgaatgaacctggagaatttattaacatgattttatggacattgtctaactcgctgcaagaaagcacacctctgttcctatcaagccatgagatttggatgcccttacttgaaatactcattgatctgtttagttgtagacaagattatttcatacagcatgaagtcgcccaaaatgtaagcaaatccttgttcgttcaacgcttatctgagagtccgttagcagttttttttgaatctttaaatacaaggaattttgcgaataggttttccgaatatgtatttctcaattgtgattacaaactgccatccgacaattatgcaacgccggttcatcccgtatataatggtgaaaacacaattgttgatacgtatattcccacaattaaatgtagtcctttgtacaaatcacaaaaatcattagctttgcggaggaaactgattgggtcatgtttcaaactattactaagagttccagatggacatagattgattactccgagaatagttgcagatgatgttatccaggggatctcacggacgttggcttcttttaatgatatcctgcagttcaaaaagttttttatgactgaaaatctgtcgcaagagtcttattttatacccctattagctgaaggtaccctttctgagatactcaaagacacacaggaatgtgtcgttattttaacgctagtcgaaaatttatcagatggcgtttcattttgcaacgaagttatcggtttggttaaatcaaaatgttttgcttttaccgagcaatgtagccaagcttcgtatgaagaagccgttttgaatattgaaaagtgtgacgtctgcctactggtcctactacgatatcttctgcatttgatcgggaccgaagcgatattagacgctaaggaacagttagaaatgttacatgcgattgagaaaaatgattcagggaggcgacagtgggccaaggcgcttaacttaggaaatgatccgcctttattgtatcccatagtctcccaaatgtttggcgttcatgataaaagtgtaattatagaataagtaactaatttttctattttttctggataagtataatgagtaagaaaggaaacagagtcaatgttaaaaaatataaataattccaagtcaaagatgatagccctttggtatcaaagcataaacattgcgcgcaatgtatgtatggccaaggagctacataaaacgcttcgctcttaattagtaaatataataatatttttttatt

SEQ ID NO: 2349 - DNA, 1080 bp, Saccharomyces cerevisiae
atgtggtgcatgagaagattgccaacaaattcagttatgacggtggctcgaaagagaaagcaaactacgatcgaagacttctttggtacaaagaaaagcactaatgaggcgcccaataagaaaggtaaatcgggcgctactttcatgaccataacaaatggcgcagctatcaagacagagacaaaggcggtcgcaaaggaggcaaacacggacaaatatcctgctaattcaaatgcaaaagatgtatattcgaagaacttgagcagcaatttacgtacactactgtcgctggagctagaaacgattgatgattcgtggtttccacatttaatggatgaatttaaaaagccatattttgtaaagttgaaacagtttgtcactaaagagcaagctgatcatacagtatttccgcctgcaaaggatatttactcatggaccaggctaacgccttttaataaagttaaagtcgtgattatcggtcaagatccctaccacaactttaatcaggcgcatggcttggcttttagcgtcaaaccccctacaccagcaccaccgtcattaaagaacatatataaggaactgaagcaagagtatcctgattttgttgaagataataaagtgggagatttaactcactgggcttcacaaggggttttattgcttaatacctcgttaactgtaagagcacataatgcaaactcgcattctaagcatggttgggaaacttttacaaaaagggtagttcagttgttgatccaggacagagaggccgacggtaagagtttagtattcctcttatgggggaacaatgctatcaaattagtagagtctctgttgggatctacttccgttggaagcggtagtaagtaccctaatatcatggtgatgaagtcagtgcatccgtctccattaagtgcaagtagaggattttttggtaccaaccatttcaaaatgataaacgattggctatacaatacccgcggagagaaaatgatagactggagtgttgttcctggaacgtcattaagagaagttcaggaggcaaatgctcgcttagagtcagaatcaaaggacccttga

SEQ ID NO: 2350 - DNA, 1436 bp, Saccharomyces cerevisiae
ttctcaggatcagcaacataagatattggctttgatattatattgcatcttattgcattgtgtgttgtggttaagacaaataaataaaggaagtttcttcttttttttccttcctttttttcctctctcagataaaagttcaacagagccatggtgtcgaaggatcaaacgtcctttaataagaggtggaccttgggtcttctgatgttgggtctagtcattattttgtgggttttatcgtccttcctgataaatttgatcttcgaggatgactcgtatagaaaaccattctttatcacgtacaccaatactgccgcctttatcttttatctttttccaactgcaaaggccgttgtggtgaattacaaggacacaggccgtgcaaacgttcaccgcgaactaattatggaggaagaaggtactggtagtgatagcaatcgctcggttgatatgactagcccactgcttacaaaccttgaagcaggcacgcatgccaaccaaaagaagaggctaacgttatatgaaacaatcaagttaagtgctgagttctgcatactttggttcacagctaaccttgtgaccaatgcctcgctggcattcacatcggtggcatcgcagacaatcctctccactacttcttcctttttcaccttgttcataggtgctatttgtcatgttgaatcgttgagcaagtccaaagtactcgggtcgttcatttcctttgtaggcataatcatggtcaccaaatcagattctcatcagcgctaccaacgccatatcgcggacgttagtggtgatgataacgatgccgtgcaagttctgataggcaacttgttggcacttgcaggtgctgtactttacggtgtctacagtactttattgaagagagaagtcggagatgagactcgtgttaacatgaagattttttttggctttgttggtctctttaatttactttttctatggccatcactgattgtattggacttttttggctgggaaccattctctctgcccaaagatcctaaagttgtggtaataatcttcgtcaattgtctcatcacatttgttagcgacttttgttgggcaaaggctatgttactaacgagtcctttaaccgtcaccgtaggattgagcataacgatacccctagcaatgtttggtgatgtaatctttaagcacaaaaccatgtctgcgctctatttatttggtgctaccctcatcttaggctcatttttcatcattaacaaaagctctgaggaggaacattttgagaactcaataacggctagcaattacgaatcagtggaggtgccagcagcaaacaactgatcttaaaaaaaaaaaaaatagaaataataaaaaaaactattagcatctaaatttcaaagtcagaagaaatttttccctatatagaatgtatattataatttttc

SEQ ID NO: 2351 - DNA, 2471 bp, Saccharomyces cerevisiae
taacataaaagcacaatacaatagcttccattattagttttgtttgttttggcaatacatgttaaatctttttctttcaagttaaatataaagattatatataaaagtacttctttggaatacatttgattatacttttctttatcgttttatttttatttcatcgttatagtcgcttcttttcccctagaggctttgtcataaaacaacaaatcaaccactctctgcttatctttccttccttttcaaaatgggtaattcaagttcaaaatcttcgaaaaaggattcacattcgaattcctcctcgagaaatcctcgtcctcaagtgtcgagaaccgagacttcccattctgtgaagtctgcaaaatcaaataaatcttcaagatcaaggcgatctcttccttcttcgtccactacgaatactaattcaaacgtccctgatccctccactccatcaaagcccaatcttgaggttaatcaccaacgacatagctctcacacgaatcgttaccatttcccatctagctcacactcgcattcaaattctcaaaacgaattgttaactactccttcatcatcctctactaagaggccttctacttctagaagatcaagttataatactaaggctgctgctgatttaccaccttcaatgatccaaatggaacccaagtcacccattttaaaaacaaacaatagtagcacacacgtatccaagcataaatcttcatactcatctacctattatgagaacgccttaaccgatgatgacaatgatgataaagacaacgacatctcgcacactaaaaggttttctagatcttcgaattctcgtccgtccagtataagaagcggatcagtgtcaagaaggaaatcagatgtgacccatgaagagcctaacaatggatcatactcctctaacaatcaggagaattatctcgttcaggcattaacccggtcaaattctcatgcatcttcgctacacagtaggaaatcttcgtttggatcagatggtaataccgcatacagcaccccattaaactctccaggcttgtccaagctaacagatcactctggtgaatactttacctctaattcaacctcctcattgaatcaccattcaagtcgcgatatttacccgagcaaacacatcagcaatgatgatgacattgaaaattcatctcaattgagtaatatccatgcatcaatggaaaatgttaatgataaaaataataatataacagatagcaaaaaagatccgaatgaggaatttaatgatataatgcaatcttccggaaacaaaaacgctccaaaaaaattcaaaaagcctatcgatattgatgaaactatccaaaaattactggatgcgggctacgctgctaagagaacaaaaaatgtttgtttgaagaacaatgaaattttacagatttgcatcaaggctcgtgaaatctttctttctcaaccttccttattagaattatcacctcctgtaaaaattgtaggcgacgttcatggccaatatggggatctcttaaggctttttaccaaatgtgggttcccaccatcctcgaactatttattcctaggtgattatgtggaccgtggtaaacagtcactggagactattttactattgttttgttacaaaataaaataccctgaaaatttctttttattgagaggcaaccatgaatgtgctaacgtcacaagggtttatggattttatgatgaatgtaaacgtcgttgtaacatcaagatctggaagacattcatcgatacttttaatacattaccattagctgctatcgtagccggaaagattttttgtgttcatggtggattgtcgccagttttaaattctatggatgaaatcagacatgtagttaggcctactgatgtaccagattttggcttaattaatgatcttttgtggtccgatcccacagattcacccaacgaatgggaggataacgaacgtggtgtaagttactgttataataaggtggcaattaacaaattcttgaacaagtttgggtttgatttggtttgtagagctcacatggttgtggaagacggttatgaatttttcaatgatagaagtctcgttacggtgttttccgcgccaaattattgtggtgaatttgataattggggggctgtaatgagcgtcagcgaaggtttattgtgctcttttgaattgttagatccactagatagtgcagctttgaagcaagttatgaagaaaggtagacaggaaagaaaactggctaatcaacaacagcaaatgatggaaacaagcatcacaaatgataacgaatctcaacagtaaatttactgactaaaaaatccagaagtattatattcattatttcatgaacaactcaacgatgtacatatgcacatatatatatatatatatatatatatatatatgaaagacaggaaatagaagttccctatctttttcttaa

SEQ ID NO: 2352 - DNA, 667 bp, Saccharomyces cerevisiae
aaggtcacctaaataccttccgagttttttttcaatgagcaaatccactaacgttagttatgaaagagtagagctattcgagaacccgaaagtacctatcgaagttgaagatgaaattctggaaaaatatgcggaatccagtctggaccatgatatgaccgttaatgaactaccaaggttcttcaaggatttgcaactagagcccacaatttggaaactggtgagaaatgaagacgtcattatagaaggaactgacgtaatagatttcacgaaactggtacgatgcacatgccagttactgatactgatgaataatttaacagtaatagatgatttatggtcgatgcttattagaaactgtggcagagacgtggatttcccgcaagtggccttaagagatcatgtattaagcgtaaaagaccttcaaaaaatctccaatctcatcggggctgaccaaagttctgggaccattgaaatgattagttgtgctactgatggcaagaggcttttcatgacatacttggactttggttgcgtattgggaaaactaggttacttaaagatgtgaagcgaacaaatccatattcaaatattttttctcctttattcggttctggaatctattcatatatatgtagaaaatagtcgagtacatatgcaattatag

SEQ ID NO: 2353 - DNA, 362 bp, Saccharomyces cerevisiae
tcgtaactgtttccatatttatgtgccgatatggtaaaagtgaaatctaagaatagtgttataaagctattgtctacagcggcaagtggatactctcgttacatctcgattaagaaaggtgcacctttggttactcaggtcagatacgatcctgtggtgaaacggcatgtgcttttcaaagaagcaaagaaaaggaaagtggcagaaagaaagccattggatttcttgcgtacagccaagtgaagaaatatgaataagcacgagccccggcatgtaagcccatcgaatacgcagacgttacgcattttttttcatttatcctgtaaataagtaatggatacatacattttgtatacgattca

SEQ ID NO: 2354 - DNA, 1252 bp, Saccharomyces cerevisiae
caagaataaaataataatatagtaggcagcataagatgagtgaaacagaattgagaaaaagacaggcccaattcactagggagttacatggtgatgatattggtaaaaagacaggtttgagtgcattgatgtcgaagaacaactctgcccaaaaggaagccgttcagaagtacttgagaaattgggatggtagaaccgataaagatgccgaagaacgtcgtcttgaggattataatgaagccacacattcctactataacgtcgttacagatttctatgaatatggttggggttcctctttccatttcagcagattttataaaggtgagagtttcgctgcctcgatagcaagacatgaacattatttagcttacaaggctggtattcaaagaggcgatttagttctcgacgttggttgtggtgttgggggcccagcaagagagattgcaagatttaccggttgtaacgtcatcggtctaaacaataacgattaccaaattgccaaggcaaaatattacgctaaaaaatacaatttgagtgaccaaatggactttgtaaagggtgatttcatgaaaatggatttcgaagaaaacactttcgacaaagtttatgcaattgaggccacatgtcacgctccaaaattagaaggtgtatacagcgaaatctacaaggttttgaaaccgggtggtacctttgctgtttacgaatgggtaatgactgataaatatgacgaaaacaatcctgaacatagaaagatcgcttatgaaattgaactaggtgatggtatcccaaagatgttccatgtcgacgtggctaggaaagcattgaagaactgtggtttcgaagtcctcgttagcgaagacctggcggacaatgatgatgaaatcccttggtattacccattaactggtgagtggaagtacgttcaaaacttagctaatttggccacatttttcagaacttcttacttgggtagacaatttactacagcaatggttactgtaatggaaaaattaggtctagccccagaaggttccaaggaagttactgctgctctagaaaatgctgcggttggtttagttgccggtggtaagtccaagttattcactccaatgatgcttttcgtcgctaggaagccagaaaacgccgaaaccccctcccaaacttcccaagaagcaactcaataaattcactagatcaataagattcaaataaagcgcacgatatatacctattttcctatatatgcaga

SEQ ID NO: 2355 - DNA, 1169 bp, Saccharomyces cerevisiae
atagggagaaaaaaaatcggaataacatttccatgccttttttttgacacttcagaccagatacgccaccagctacaaactaacaatgtccactgatagtacacgctatccaattcagattgagaaagcctcgaatgatccaacccttctgcttaatcacacatgtttaagagtcaaggatccagcaaggaccgttaagttctacaccgaacacttcggtatgaagctattaagcagaaaggattttgaagaagcaaaatttagcttgtactttttaagctttccaaaagacgacatacccaaaaataagaatggagagcctgatgtttttagcgcacacggtgtcttagaactaactcacaattggggtactgaaaaaaacccagactacaagatcaacaacgggaatgaggaacctcatcgtggatttgggcacatctgtttttctgtatccgatatcaataaaacctgcgaagagctagaatctcagggtgtcaaattcaagaagagactctctgaaggaagacagaaggacattgcgtttgctttaggccctgatggatactggattgagttgatcacatattctagagagggtcaggaatacccaaagggctcagtaggtaacaagttcaatcataccatgattcgtattaaaaacccaacccggtctttagaattctaccagaatgtgttgggcatgaaattattaagaactagtgagcacgaaagtgcaaaatttacgttatactttcttggttatggcgttccaaagaccgacagcgttttttcatgtgaaagtgtgttggagttaactcataattggggaactgagaatgatccaaacttccactatcataacggtaactcagagccccagggttatggtcacatctgcataagttgtgatgacgctggcgccctttgtaaagaaattgaagtgaaatacggcgataagatccaatggtctcctaaatttaaccaaggcagaatgaagaatattgcctttttgaaggatcctgatggttattccattgaagtcgttcctcatggtttgattgcctaaaaagttgaaatgaataggaggttagtattttttttttacaataatgaccattcttgttgacttttcatacactaattattatttatattttgtatttaagtac

SEQ ID NO: 2356 - DNA, 74 bp, Saccharomyces cerevisiae; identical to SEQ ID NO: 899

SEQ ID NO: 2357 - DNA, 74 bp, Saccharomyces cerevisiae; identical to SEQ ID NO: 899

SEQ ID NO: 2358 - DNA, 74 bp, Saccharomyces cerevisiae; identical to SEQ ID NO: 899

SEQ ID NO: 2359 - DNA, 72 bp, Saccharomyces cerevisiae; identical to SEQ ID NO: 236

SEQ ID NO: 2360 - DNA, 72 bp, Saccharomyces cerevisiae; identical to SEQ ID NO: 236

SEQ ID NO: 2361 - DNA, 73 bp, Saccharomyces cerevisiae; identical to SEQ ID NO: 397

SEQ ID NO: 2362 - DNA, 89 bp, Saccharomyces cerevisiae
tcaaatgatgtaataacatatttgctacttcagatggaactttgagttccgaatgagacataccaattatcaccaagatctctgatgaa

SEQ ID NO: 2363 - DNA, 258 bp, Saccharomyces cerevisiae
aataatgtcttttataatagacacccagagtcacgattcgtcttggttttagagattctgtttcgacagtttttttaggcggtggacgtatatagtttacttaatcgtttactatacggtggagtactaatactatttcactgtcgtgctcgcggttgatcttagataaatatatttctttttcataaagaaagtgagtggatcttccctggaagtacgaataatgtacttatgattagattctcttcacgcacatac

SEQ ID NO: 2364 - DNA, 98 bp, Saccharomyces cerevisiae
gtgatgtgatgacaacttcttgagctatatattttcttgagaacatcaatgaagaaaacgtctcatcaaatgatttgcacgtcagtctgatcacaagc

SEQ ID NO: 2365 - DNA, 106 bp, Saccharomyces cerevisiae
gtttatgatgatttccacatttcacgacggtcaactgcgtttttcgaatgtttatcgattaactttgatgatatttcgcctgtgacagggcgtggtactgagcttt

SEQ ID NO: 2366 - DNA, 89 bp, Saccharomyces cerevisiae
ttatgatgagatatttatagatgacgagtctgatcattcgtgaagacacaactattaaaattaccattcatgcctttctgaagctgttt

SEQ ID NO: 2367 - DNA, 109 bp, Saccharomyces cerevisiae
aatggaaatgaggatccacagcactgggcactgagggggaaacaaatatcctttcaaatgagtgacaatgctttagcgggcctagaaaacccgcgcaactgatccattg

SEQ ID NO: 2368 - DNA, 88 bp, Saccharomyces cerevisiae
ttcatatgatgattataacaaaaacaaaagctggaattactggctgaacgagtatatgttgatacgtttttgcactatcctgacctag

SEQ ID NO: 2369 - DNA, 87 bp, Saccharomyces cerevisiae
tcccttgatgaccaaaataaatttttacaaactagagtttctgaatcttttgtgattagaacgtttattcttatttctgaggttttt

SEQ ID NO: 2370 - DNA, 72 bp, Saccharomyces cerevisiae; identical to SEQ ID NO: 229

SEQ ID NO: 2371 - DNA, 72 bp, Saccharomyces cerevisiae
tccgatatagtgtaacggctatcacatcacgctttcaccgtggagaccggggttcgactccccgtagcggag

SEQ ID NO: 2372 - DNA, 73 bp, Saccharomyces cerevisiae; identical to SEQ ID NO: 231

SEQ ID NO: 2373 - DNA, 766 bp, Saccharomyces cerevisiae
caccaacaaaataagaggaataagctcatccagtccacttcttatccatatagaaaccccttctgtatcaattcaaattaagtgatgtcttctagaaaaaaaaatattttgaaagtaatcatcctaggtgactctggtgttgggaagacctccttgatgcaccgttatgtcaatgataagtattctcaacagtataaagcaacaattggggctgactttttaacaaaagaggtgacagttgacggtgataaagttgccaccatgcaagtttgggatactgctggacaggaacgtttccaatcactgggtgttgctttctatagaggtgcagattgttgcgttttggtctacgatgtgaccaatgccagttcctttgagaatattaagtcttggcgagatgaatttctagtgcatgcgaacgtaaactcaccagaaacatttccatttgttatactgggaaataaaattgatgccgaagaatctaaaaaaattgtatcagaaaagtccgctcaggagcttgctaaatcattaggcgatattcctttgtttttaacaagtgccaaaaacgccataaacgttgataccgcatttgaagaaattgcaaggagtgctttacaacagaatcaagctgatacagaagcctttgaagatgactataatgatgccatcaatattcgcctagatggagaaaataattcttgtagctgttgagctgtactacttaattgtatcttctattatgtaatcctttatagcgtatccttaa

SEQ ID NO: 2374 - DNA, 3276 bp, Saccharomyces cerevisiae
ggtaacagcagaaggaaagaggaacgggtgttgtgataattatgagtgacaactcggacacaaacgtgagcatgcaggaccatgatcaacaatttgctgatcccgtagtggttccgcagtcaactgacactaaagatgaaaatactagtgacaaagatactgttgatagtggcaatgtgaccacaacggaaagtacagaacgtgcagaaagtacaagcaatattccccctttagatggggaagaaaaagaagcaaaatctgagccacagcaacctgaggataatgcagaaacggcggccacagagcaggtttcatctagtaacgggcctgctacagatgatgcccaagcaactttgaatacggattcatccgaagcaaatgaaattgtcaagaaggaagagggctctgatgaaaggaagagacctcgcgaagaggacaccaaaaacagtgatggtgataccaaagatgagggcgataacaaagatgaagacgatgatgaagacgacgatgacgatgatgatgatgaggacgatgacgatgaagccccaactaaaaggcgtcgtcaggagaggaacagattcttggatattgaagctgaggttagtgatgatgaagatgaagatgaagatgaagaggattcagagttggttcgtgaaggtttcattacccatggtgatgatgaagatgacgaagcaagtgctccaggcgcaagaagagacgatagattacatagacaactggaccaagatttgaacaagacttcagaagaagacgctcaaaggttagcgaaagaattaagggagcgttacggtagaagcagctccaagcaataccgtgctgctgctcaagatggttacgtgccccagaggtttctcctaccaagtgttgatacagctaccatttggggtgtgcgctgcagaccaggtaaagaaaaggaattgattcgtaagttattaaaaaaaaaattcaatttggatagggcgatgggtaagaaaaaactgaaaattttatccattttccaaagggataattacacaggaagaatctatatcgaagcccctaagcaatccgttattgaaaaattttgtaatggtgttccagatatttatatttctcaaaaattgctaattcctgtccaagaattacctctattactaaaaccaaacaaatctgatgatgttgctttggaagaaggtagctacgttcgtattaagagagggatctataagggtgacttagctatggtcgaccaaattagtgagaataatttagaagttatgctgaaaattgttcctcgtctggattatggtaaattcgacgaaattgatccaacaacacagcaacgtaaatccagaagaccaacttttgctcatagagcaccaccgcaattatttaatccaacaatggctctaagattagaccaagctaacctgtacaaaagggatgatcgccactttacttataagaatgaagattatatcgatggttatctgtataagtccttcagaattcaacatgtggaaaccaaaaatattcagccaactgtggaggaattggcaagattcggttccaaagagggcgcggtagatctaacatcagtttcacaatcaatcaagaaggctcaagctgcaaaggtcactttccagccaggtgatcgtatcgaagttctaaatggtgaacaacgtggttccaagggtattgtaacaagaaccacgaaagatattgctactatcaaactaaatggctttacaacgcctctagaatttcctatctctactctgaggaaaattttcgaacctggtgatcacgttactgtcatcaatggtgaacatcaaggtgatgctggtttagttcttatggtagagcaaggtcaagtgacatttatgtcaactcaaacaagcagagaagttaccattacagcaaataatctgtccaaatccatcgacactacagctacatcaagtgaatatgcgctacatgacatagtcgaattgagtgctaaaaatgttgcttgtattattcaagctggccacgatatcttcaaggttattgatgaaactggtaaagtgtcgacaattacgaaggggtctatcttgagtaaaataaatactgctcgtgcacgcgtttctagtgtcgatgcaaatggtaatgaaatcaaaattggtgataccatagtagagaaagtaggttcacgcagagaaggtcaggtcctgtacatacaaacacaacaaatttttgttgtttcaaagaagattgttgaaaatgcaggggtttttgttgttaaccctagtaacgttgaggccgtggcatccaaggacaatatgttaagtaacaaaatggatctaagtaaaatgaatccagaaatcatttctaaaatgggacctccatcatctaagacattccaacaacccatccagtccagaggaggtcgtgaagttgcactcggcaaaacagtaagaattcgttctgctggttacaagggtcaattaggtattgtgaaagatgtgaatggtgataaagctactgtcgaattacactcgaagaacaaacacattacaattgacaagcataagttaacatattacaaccgtgagggaggtgaaggtatcacgtatgatgaattggttaatagacgtggtagagttccacaggccagaatgggcccaagttacgtcagtgccccaagaaacatggccactggcggtattgcagcaggtgctgcggctacctcttctggtcttagcggtggtatgacaccaggatggagctccttcgatggtggcaaaacaccagctgtaaatgcgcatggaggctcaggtggtggcggtgtctcctcatggggtggtgcttccacttggggtggccaaggtaatggaggtgcatccgcttggggcggtgctggcggcggtgcctcagcttggggcggccaaggtactggtgctacttctacttggggtggtgcttcagcctggggtaacaaatcaagttggggcggtgcatccacttgggcgtcgggtggtgaatctaatggtgccatgtctacttggggtggtaccggtgataggtcagcctacggcggggcttccacctggggaggaaataacaataataaaagtacaagagatggcggagcttctgcatggggtaaccaagacgatggaaataggtctgcttggaacaaccaaggaaataagtcaaactatggtggtaacagtacatggggaggtcattaatcaccaaaaggagaaccaatatcacccaagaagaaatcaataa

SEQ ID NO: 2375 - DNA, 810 bp, Saccharomyces cerevisiae
ttagttgtataactcagttgatctcataagtgaaaagcaaaaaaaggatgcaggtgttacagttatggttgacaactttgatctctttggtggtggcagtgcagggattacatttcgacattgcagcatctacagatccagaacaggtttgtattcgtgattttgtcactgaaggtcaattggttgtcgcggatattcactcagatggttctgttggtgatggacagaaactaaacctcttcgtgcgtgattcagttggaaacgagtatcgtagaaagagggactttgcaggcgacgttcgtgttgcgtttactgctccatcctccacggcattcgacgtttgttttgaaaatcaggctcagtatcgtggccgttctttaagcagggccattgaattggacattgagagtggtgctgaagctcgtgactggaacaagatcagtgccaacgaaaaattgaaacctatagaagtggagttgcgtagagtggaggaaattaccgacgaaattgtcgacgaattgacttacttgaaaaacagagaggagagattaagagacaccaatgaatctaccaacagaagggtaagaaatttctcaattttggttattattgtcttgtcctcgctgggtgtttggcaagtcaactatttgaagaactacttcaaaacgaaacatatcatttaagcaaaggaagaggaccacaccatgcatttgtgtatcagcttaccctataattgcatatgtactcgactattttctacatatatatgaatagattccagaaccgaataaaggagaaaaaatatttgaa

SEQ ID NO: 2376 - DNA, 1979 bp, Saccharomyces cerevisiae
atgccagtagtcaatcatgaggatagtgaatttcacctttcgcacacagaagaggacaagttaaatgagttccaggtcatcacgaatttccccccagaagacttgccagatgtggtgagactgttgaggaaccatggttggcagttagaaccagcattgagccgatatttcgatggagagtggaaaggcgaaccagaccagatgggagagcccactcaaacgtctacacccatggctgagaccttggttcctcccgcgttgggacctagaccgttgttatttacagcctcactgcccgtggtcagaccattgccagcgaacttccgcaatgatttcagaacaattgggctaaatggacgctctaacactgtgtggtccatgtttgaatcttttagttatgatggtaacccctttctttttattttactgttgatccctcggataatcaataggttatctgccacaatattcacgttcttttgcactctattgtccctgcattcgataagtggtggcggtaattcaggaaaacccaagatctccaaggttccaaaggcaccaaccagagaaacccatatcccacttgcagaaatactgggtgacacgaaggacaaggatgcattttgcgaactaaaaagctttaaaccagacatttccttcaatgaggccttgcgtattgcaaaagaagagtttaagtttatgttgctcatcctagtgggcgacacctacgataccgatactgataccgtagatgttaattctaaactactattggaaaagattttgttaaacaagaagactttacagtacttgcgcaagattgataacgacctgattatctatttgaaatgcgtacacgagttggaaccttggctggttgctcgccaactaggtgtcagaaacaccccggagatattcctcattgccaacgtggctaataaggcttcccattcagaaactttgccctcacaaagactctccattctcggcaagctaaaggtcaattcactgaacagattcttgcagtcgttaacaaacgtggtggaaaagtacactccagaattagttgttaataaaactgaaatgcacgagctacgcatgtcaagagaaataaaaaaactgcaggaggatgcgtacaaaaagtcgctagaaatggacagaatcaaagctatagaaaaggaaaagagcttgaaacacgctcaggatttgaaattaaactcaactgctcggcaattaaaatggttaaaggcttgcatcgatgagatacagccgttcgagacaacggggaagcaagctactctgcaatttaggacttctagtggcaaaagattcgtcaagaagttcccctccatgactacactttaccaaatctaccaatccattgggtgtcacatatacctcgcggtatattctagtgaccccgcagaatggtctaacgccctccaggacaaaatcaggcaattatctgcagacgacgatatgctctgctttaaagaaggacaactcgaaactgctactgctaccactatcgaagagctcggccacatcatcaacaacgagcttacctcatttgatctcgaacgtggtaaacttgaattcgactttgaattggtatcgcccttccctaagtatactgtgcatcctaacgagcacatgtcggtggaccaagtgccccagctatggccaaatggcagtcttctagtggaagcactggatgaagaagatgaagaagatgaggaaaatgaagaacaatgataaaatagcatatcgttaaaaacgacaaacgcgtacaaagagtttctggagtttacttttttttcatttttcgtttttactctttcgtctccctaatgattttggccaaccgttggttgttacgtgttatatgtttgttttaggagctggggcctacctttatagttagttgtataactcagttgatctcataagtgaaaagcaaaaaaaggatgcaggtgtta

SEQ ID NO: 2377 - DNA, 956 bp, Saccharomyces cerevisiae
aaaaggttaagaaccaacatggagataaaccaagcggctgaaaaagaacaggagtatgttcacaaagtgtataatgagatagctccgcatttctcgcaaactagatataagccatggcccatagtgactcagttcttgaagactcgcccaatgggttccatcggtatcgacgtcgggtgtggcaatggaaagtacctcggagtgaaccctgatatatatattatcggttcagatcgctcagatggtcttattgagtgcgccagaggaataaacccatcgtacaacttactggtggcagacgggctgaacttaccacacaaaaacgaaacatttgacttcgccatctcaattgctgtagtgcatcactggtctacaagggagagacgtgttgaggtgatcaggcacgttctatcgaagctacgtcagggcggacaagcattaatatattgttgggctctagaacagggcagctcccgtagaggttaccatgaaggtatggagcaagatgtctttgtcccctgggttcttcccaagagtaaatccaaaccaaaaactaaatcaacgccgcctgctaaagtcaagacaaggccaaagccaaacttaatgaatattcccccaaaggagcgttccgaatacttgcagcgctggaaggaggaacagcaacgcagtaagtctcttgatgataacgacgagaagcaacaacaagatcaagaacaggaaagagaagaggtaaaataccgatactatcacttataccgagagggcgaattggctgaggattgccgccaagctggggctgccgttcatagtgagggcttcgagcgcgacaattggtgggtggtggcccagaagagatgaaggtgatatataggtagacagtgtattttgtagcagcaggtattacgatagaagtatgtaatagctttcatagtgtaatcgaagatgccagtagtcaa

SEQ ID NO: 2378 - DNA, 1326 bp, Saccharomyces cerevisiae
gagagccgcgaactgaatcatacaaaaaaaatatgaagtggtgtagcacatacattattatatggctcgccattatattccataagtttcagaagtccacagccactgcatcccataatatagatgatattctacagttgaaagatgacaccggtgtgataacagtgaccgctgacaactacccactgttaagccgtggtgtcccaggttacttcaatatcttgtacatcacaatgaggggtacaaacagtaacggcatgagttgccaactatgccatgattttgaaaaaacctatcacgcagtggccgatgtaattcgctcgcaggccccacaatcactaaatttgttttttacagtggatgtcaacgaagtaccacaattggtcaaggatttaaagttgcaaaacgtacctcatcttgtggtatatccgccagcagaaagtaacaagcaatctcagttcgaatggaaaacatcacctttttatcagtactctttggtacctgaaaatgcggaaaacactttacaatttggcgattttctggctaaaatactcaatatttcgataacggttcctcaagccttcaacgttcaggaatttgtttattattttgttgcgtgtatggtagttttcatctttattaagaaagtaattctaccgaaggtaactaataaatggaagcttttctccatgatattgtcattaggcatacttctaccaagtattactggttacaagtttgtggaaatgaatgctatccctttcattgcacgtgatgctaagaatcgtataatgtattttagcggtggttcaggatggcagttcggtatagagattttttctgtatcattgatgtacattgtgatgtccgcactgtctgtgcttttaatttatgtgcccaaaatctcgtgtgtaagtgaaaaaatgagaggactattgtcgtcatttttggcatgtgttctattctacttcttttcttatttcattagttgttatttgataaagaatccagggtacccaattgttttttaattttgagaaaatgcgtttttcagtttcattataacatgtatatttgcatttctttctcacggcaaagttagtgacaaagaataaggtttgtatgaagccaacgagatactttttctcttattgaaaattcttttggcctctgttttgttagtctggatactgaaaaaaatgtttaagattattaaatcacacaggaatgaaattgttattagaaaaattataatatacattctatatagggaaaaatttcttctgactttgaaatttagatgctaatagttttttttattatttc

SEQ ID NO: 2379 - DNA, 813 bp, Saccharomyces cerevisiae
tgcttcaaagaaatctatcgcaaatattcctactaatcatgtctatagcaagttatgcccaagagttgaagttggctttacatcaatatccaaacttccctagtgaaggcattctcttcgaagatttcttacccattttcaggaacccaggtcttttccagaagttgatcgatgctttcaaactgcatttagaagaagcttttccagaagttaaaattgattatatcgtcgggttggaatcccgtgggttcttgttcggaccaactttagctttggccctaggtgttggtttcgttccagtcaggaaggcaggtaagctacctggcgaatgttttaaggctacgtacgaaaaggagtacggttctgatctttttgagatacagaaaaacgctattccagcaggttccaacgttatcattgttgatgacattattgccactggtggttctgctgctgcagccggcgaattagttgaacaactcgaagccaaccttttggaatataactttgttatggagttggatttcttgaaaggcaggagtaagttgaatgctccagtgttcactttactgaacgctcaaaaggaagcgttgaaaaaatgatatgtttcacgtcctgacccatattcaagcttcctttctgccggtttcaagcaatttatttttcttacttctccttactctctcaatttggttgtataatatttactttttagattgaaaaatattcaatccacttttctgctttgtgccacaaagtagtctatttagttttttatctattatatgcttttaaagagtttggaaatcgaga

SEQ ID NO: 2380 - DNA, 552 bp, Saccharomyces cerevisiae
tctcgagactagcaataacaaaatgggtagagttagaaccaagaccgtcaagcgtgcttctaaggctttgattgaacgttactatccaaagttgactttggatttccaaaccaacaagagactttgtgatgaaatcgccactatccaatccaagagattgagaaacaagattgctggttacaccacccatttgatgaagagaatccaaaagggtccagttagaggtatctctttcaaattgcaagaagaagaaagagaaagaaaggaccaatacgtcccagaagtctctgctttggacttgtctcgttctaacggtgttttgaacgttgacaaccaaacttctgacttggttaaatctttgggtttgaagttgccattatctgttatcaacgtttctgcccaaagagacagacgttacagaaagagagtttaaaattaaattagaaagctatttaaaataatttactattcaaaatatttgccttttcttttttaatttttgtttattctttaatgtataattaaataaaaaaatattattatatttactaa

SEQ ID NO: 2381 - DNA, 1615 bp, Saccharomyces cerevisiae
gtatgatttgggtgaaaacacagtggtgaccacagaacaacgaggtaacagttccagaccactacctttccccttcaatctttgtgatttgatcaattcttgatgtcacaagaaacaaaaatgctaccttctctatctagtcttctatcgggaaccgaaatctcgtccagccccgtatcaccaagcttcactaatccaagaacgagttttcacctcgatgatcgcggaaccataaaattaccaccgctaaacaccagtatcaatcgtccaagatctgtggaaagcgccttgagacacactgttacatccttgcatgaaaatagcagcgcttatggtgatgacatgctcaagcacacgcaatcagactcagccctctcatctcagttgaatagttctcaagaaacagttgatgaatcacacgaaaaccttctactgactcccctaaatagcaaaaagagagattattcggtttcttcaaagaaaaacgacatattaacaccactctctgcagcgaagtcgattattatcccctctgcctctaaggaaaaaagacgtgcatttgctttcatcacacactcgcaggagaccttccctaagaaggagcctaagatcgacaacgctccactagcacgccgaaagagaagaagaacctcgtcccaggaactatctattcttcaggctgaatttgaaaaatgtcctgctccatcgaaggagaaacgaattgagttagctgaatcttgccatatgactgaaaaagccgttcaaatatggttccagaataaaagacaagcggttaaaaggcagagaatcgccacttcgaagtcaaccactataatacaaacggtatctccaccatctccgcctctggacgttcatgctacgccactagcatccagagtcaaggcggacatacttcgtgatggaagctcatgttctcgttcttcctcttcttcaccgctggaaaatacgccgccaaggcctcatcattccctaaataggcgctcatccacaccaagcataaagagaagccaggctttaacattccatctaaacccacaaaagaagacgttgactcccgtgaaaacgtctcccaacagcagagtaaataaattgatcaatagcatagatcattctccatccaaagccaagcgtccggtaagcaatccctccggctcccctaaaaggaagagaaaattcggattcaagatcgtcgatcaacaaccgttgaaggatcttgatccgaacgctttccgtggttgatctaatctctagtcattatttattcgcaaattcatttccctatacggcattcatacatatcattgttcacttcagtcctagcatatatcataaaatatacaattgttttctaattaccttacgttttttaaaagacttctataacacctcttttaactttacatgtagtcaaaataaagtgcagttccatcgatggtactttctcaccccggttgagtgatgttaacgatgtttaccgtataaaacttaattatattatatctttttttgcttatatgttatacatagaataaaaagttgattaaacacacattggtctgaaaacacgtgtagtactttctcctttgaagaataa

SEQ ID NO: 2382 - DNA, 730 bp, Saccharomyces cerevisiae
ccaaccacaactacatacacatacatacacaatggtcgctcaagttcaaaagcaagctccaacttttaagaaaactgccgtcgtcgacggtgtctttgacgaagtctccttggacaaatacaagggtaagtacgttgtcctagcctttattccattggccttcactttcgtctgtccaaccgaaatcattgctttctcagaagctgctaagaaattcgaagaacaaggcgctcaagttcttttcgcctccactgactccgaatactcccttttggcatggaccaatatcccaagaaaggaaggtggtttgggcccaatcaacattccattgttggctgacaccaaccactctttgtccagagactatggtgtcttgatcgaagaagaaggtgtcgccttgagaggtttgttcatcatcgacccaaagggtgtcattagacacatcaccattaacgatttgccagtcggtagaaacgttgacgaagccttgagattggttgaagccttccaatggaccgacaagaacggtactgtcttgccatgtaactggactccaggtgctgctaccatcaagccaaccgttgaagactccaaggaatacttcgaagctgccaacaaataagacgcttgcagagttgtctaaatgactacttatttaaaattcactctttacgtttatacctatctatctatatataaaacccataaacttaatgctattcactgacaa

SEQ ID NO: 2383 - DNA, 3020 bp, Saccharomyces cerevisiae
tattcaattgcaaggtgacgtacttcagataaacactttattgtaccatcttaagcggctatataaagtgtcatatacacccttcaccaaatacgcaacatgtctgaatatctagctcagacgccctgcaaatttactatatggtcaagcgagattgatcttatcagaacaaacctgttggtgaacgctcaccctttaagcacggttgggcgactacttcaatatatccattatcaaatatacaagcaattaagagctatctatcaaccagaggaacagtgcacgaactcggaaatacctcacacacccttaaatagtatcaacacttacttcctaagttacgaaggcagagagttatctgcaacgtgtttattaaaggacatcacgtcatctagccacccagattcgaaccatttcataagactacaactggaaaagcgtacttctccttccggttcagcatttgacttggaatatgatatggagggcgaatttaactcgatgaatattcaatttgagataaatacactatcttctcaacgtatattcaattccatggaaccaaatttgcctattggcactacattggctagattagagaaactggcattggaacgtataaaggattttgaaaaatcagcagggaatctctgtggtattaaagaggaccattcagtgtctgatttgcagggatttataataaaggggaaacagacacccatgtttttaaattatggaagtgattctgattactataaagacttgaacctggtagatttgataggcattgattttgccccggcacacaattcttttttcacatttttgttcaagatgaatcacgaacagaattcacatatcgccaacgatgaagagagatttgtgttggaattcatatccgatgccacattatctataactcaaatgaatgttaagcccgataccacggtaaaacaagtgaaagatttcatatgttctgtttacactcactcattaaacttgaggagaaatgatatcaagttgatttataagggacagttgcttcatgaaaataattttgcaggcaactcttcaaagatcagcgagtacattaaagagccacatgaagtgaaggtccatgtacaaatcaaccaagagtatacagaatctgggcctggattttggaatgaagtgttcaacaatccgaatattttccaattcatgcctccagatacaaggtcacagtcacctgttagtttcgctccgacgcaaggacgatctcctgctgcaatacgtggcgaagaacggggtataccatacgtaaccgaatctggaaatgacatcgtgcccacagatgagctttataggaaatgcattatcaacggggatgaagtagtattcattcctgttagcgaactaaatccacaatcgagctatttgtccgtgatcaaaggcgattacggtgaaattaaaatccccatatctagtaatgactacagaattaatggcgataatattttgctatcaccatctgcgatagagcagttagaatctgctttgaacttcaaaatcgagagaccacgggattcgacactcttgcatccgtctggtgagcatgttcgagctgcagataatacctcttcggcaaatgataataatacagttgagaatgacgagtcagcgtggaatagaagggtagtgcgtcccttgagaaacagcttcccgctgctattggtattgataagaacattttacttaattggctataattcattggttcccttttttattattttggagtttggaagcttccttccctggaaatatatcattttactaagcttgcttttcatttttaggactgtttggaatacccaagaggtgtggaatttatggcgagactatctccacttgaatgaaattgacgaagtcaagtttagccagatcaaggagttcatcaattccaattcattgaccttaaatttctacaagaaatgtaaggacactcaatccgctattgatttactgatgatacctaatctacatgagcaaaggctatcggtctattctaagtatgatattgagtacgacaccaacacccctgacgttggacaattgaatttgctatttatcaaggtgctatcgggtgagattcctaaggacgcgctagatgagttgttcaaagagtttttcgaattgtatgaaacgacaagaaacatgaacacactatatcctcaagactctttgaacgaattgctgctgatgatttggaaggagtcccaaaagaaagacatcaatacgctacccaagtacagaagatggttccaaaccttgtgctcgcaaatagcggagcataacgtccttgatgtcgtactcagatacataattccagacccggtaaacgatagggtgataaccgctgtgataaagaacttcgtgctcttttgggttacactactcccctatgtgaaggagaagctggatgatattgttgcacagagagcaagggaccgtgagcaaccggctccatctgcccaacagcaggaaaacgaagatgaggccctcataatccctgacgaggaagaacccaccgccacaggtgcgcaacctcatctctacattcctgatgaagactaattgcaatgcgatgtggccacgttatataatgcgtttaaggtgtacgaaaacccatgctgttctggcccgtcgggttttctgacaaattgtcctttagggatttttcggtttggctcgggttggcaaagtcggctggcaacaaaccaggacatatataaagggaggtaattcgtcagatcaatgccgaaccgttctcaacgggccttcccctcgttcaattgctcacaaccaaccacaactacatacacatacatacacaatggtcgctcaagttcaaaagcaagctccaacttttaagaaaactgccgtcgtcgacggtgtctttgacgaagtctccttggacaaatacaagggtaagtacgttgtcctagcctttattccattggccttcactttcgtctgtc

SEQ ID NO: 2384 - DNA, 2034 bp, Saccharomyces cerevisiae
atgatacagacgccaagggagttgttgaatccacggtacacgtaccataccatctttagcgacgtgtgcaagacccgattcaaccatttagttacgaggttgtttttcatatgttctattatccaaactgtggtgatttcactgctggcgttgccacactcaccgttatgggaactggcattggcatttattcccaatattttagctcttaacctagtttcccttttgatcattgtgacaagaaaaaattacatgcatgtaaagaattttgggttcgctaattcacttactttcattctaggccaattgttatcagtaaagtttcttgtataccagggagtctatagcatgggcagcatccttttatcattcgtactgggtgtggttttcggacgtggcggatctggatggaagccatactataagctgtttatttggctagtcgttcccacgatttacaacctacaacatcatgtcactgacgctgacaaattgtcgttcaactgcgaaaactttttccaggccccacaagactacgtattagagcgtgtcaagaggattatggagaagtcagtcattctaagtgtaatcagcatgttcgtattaccaatctttaccacagtatttttttccaggcaaaaatcgggattatttgattcatttacgaatggcgtgctagctgtcacaaatttactaataatctcctgcattatcttcatcactttcgaattcataaatatagcatttgacgcacatatgtccataggttgtctgcacaagggcaagctaatttcgaatttgtcgtcgacgccgatggaaaccctgcttagtgggctttctgcagacaagccatttactaggttgactgcctaccaggaactagcgtatagggccacttcactggatccatcattgcgagcaccaatatatcactccaagttcagaagcagtagtggtaatacttggtcattaatcctcaatgaatgcttgaagaccattcagataaacaatgaaaaggttgtgcagtacctaagatcagtacaagatcttgggggctctgcaactgctagacataaaaaaaaagtagaaaatctagattatatgtatgagaacgggaaactaacaagcgccaacgaaagactctttgggaaccgaccctctatgatggcgccattacgggataacggcttattagatgaatcaccaaacaggctgagggtaagaactgacgatagtgtattgcttaaccgcggaaacaagaaaaggcataggtcctcgtattacgacaacgatttagatgaaacgacacaaacttttaacggctctattttcacccacgaaacaacatttatgaccgctatgcgtctgatgttaaaaaaactgaaaaattctataatgtcgtttattttcccttcctacgcagaaagacaatcatctgatgaaagcgacaattacagactattaccaaatggctccaacaaagcccaaatctcgataattgacatatggtccatttccaagaaaaggcaagctgagaagctggttccattgcccatatgccacgcaaatagtgtggtagcactgacaggactgctgatccgatcaaagacagaagatccaaaaggcggtatcattgcatccgttggggatattcttaagactttggagaggtccatctgtgcactgggtgaatttgccgattgggatccggaatcgatggcatacactgccttccaaacacaaaggacagcccaagatagagtacaacaagacagtgaagacgaagatagcatgaaagacactactgacatgatcagtgttctttatcagctgtccaccagtgcttttatggagattgtacttgaatacaatgttgctctgaacgacgtatatttggatgcagacgtggccaagttggcgaactggtttctagaagtgtacgcctcaggcaaccctaatgctacgtaatacaattcaaccgaggagcacccctcctcccatttcatgtaagataaatacaataataaaaattgg

SEQ ID NO: 2385 - DNA, 819 bp, Saccharomyces cerevisiae
tcgctgcccattatacaatcatcatggtagtatccatcataccgcaatttcctgatatcaaggtttcactagcattgtttgaacaggttaaaaatgctaaagaaatacgctctaaaatgagtgaattgtcgacatcctttgcctttattgacccccggttagtctgttcgggggagcagatgtattctgcaatttacaagaccttaatagaagtgaaatataacaagatgagaacaagaaatttgaattccgagtgcgtactatgtctttcacccacttccaatattagtgatgctttcctcaaattcggaatcaaagacgattcgtcacagttaatatgccttaagttccatactaatactgacgatgtagacaaagagcaattgaggacgattatgacttctatagtaaaaggacaagagatcgagtttaatgatgacaatttatcgagattttatgacgaagcgctcataagaaaaatctataaattaagtgatgatttcaagccccaagacgtaaatggtctctcaagagctttggtagacgctattcaattgaggggtgtgtagataagagatatctaacgataaaattataaaaaaaattctttgattatttttcagattagtattatttgttctccgtgaagtcagtgtatcgaactgccaaaagttctccttatatacatgtgcgcgtataaccatcacttttcttcaatggttctcttgaaattggcaaaatgattaactaattccagttcagttgataatgtatcgtatctgtagttaattctaatatcaggaacatttgttctaacca

SEQ ID NO: 2386 - DNA, 1440 bp, Saccharomyces cerevisiae
tggactttgttttgatagagggcgattgcaagcatggagatttacattagacttaacgcagatgtcgagcacgactatgcgtttcaggtgtcaaatgaagacaccataaataacaaaattaagaagattttcccttccaagacgggtttggcggacttaatggtgctgagaccatcaattttccatgagaaggagcccgtaaagttctataagtctatccatccagggtacctgtccgaaggtggttgtttgatgttccattatgaagctgataacgaagaaaatctcgaggagttgaatgactccaagccgcttattgaccagttgtggcctggtcagctagttgttccggagtggaagctatccaagaaaaacatatgggtatacaccattattatgttggcctggctatataccgatttgcccgacgccatttctccaaccccaggtatttgtttgactaatcaattgtctagactattgattcctgtagccaagcacatggatttacctgaaattgccgctaaactcgaacaagaagttcaggcaaactattctagtctcgtagctcaatggcttttctttgtcatgcacattttcaaagtgggcataattactttattcctcaaattaggcattgccaaccccatcagcttcaatccttacaagttatggagtttgagagatttaacttctccttctgctaacggcgctaagaattctggcggcaataacaacactactgacttaaagacacgtttgcgctctctgggctggattggtgctaagagagctacttacgacgattaccagactaactattacaactatgtcatagataagatgggtggtgcagttgctgcttatagagcgggcgcgattaggaaagctgcagcaccaggtatccaacttgtggctggagagggtttccaaagtcctctagaagataggttcactgcttccactttcacggctattaaaaccgaacggaaattcattttaagtgaagaatactttgtggagctggaaaacaatctaaagaagatcttggaagagtatgacggggatattggtaagatgaatgctgaaattaggaggtttagaaggtttggtatttatgaaccagatgaaaaactggcctcgctagttaagctcagaagagaaattgctgatgagaaagagaaagcatcaaacaatgatgctacttttggtataaaaaagaatgatttgaaaaaatctaattaattgtaaaaccaaaacactaccatccagactttttttttattcaaccatagcctttaactactactactactactagtactactactattactattactattactactactagagggcctttttttactcctagtatttttgtactatcctatttactctcgttgtttttattagttttttcactctttttttcaa

SEQ ID NO: 2387 - DNA, 1465 bp, Saccharomyces cerevisiae
gccgaccagcgtatacaatctcgatagttggtttcccgttctttccactcccgtcatggactacaacaagagatcttcggtctcaaccgtgcctaatgcagctcccataagagtcggattcgtcggtctcaacgcagccaaaggatgggcaatcaagacacattaccccgccatactgcaactatcgtcacaatttcaaatcactgccttatacagtccaaaaattgagacttctattgccaccattcagcgtctaaaattgagtaatgccactgcttttcccactttagagtcatttgcatcatcttccactatagatatgatagtgatagctatccaagtggccagccattatgaagttgttatgcctctcttggaattctccaaaaataatccgaacctcaagtatcttttcgtagaatgggcccttgcatgttcactagatcaagccgaatccatttataaggctgctgctgaacgtggggttcaaaccatcatctctttacaaggtcgtaaatcaccatatattttgagagcaaaagaattaatatctcaaggctatatcggcgacattaattcgatcgagattgctggaaatggcggttggtacggctacgaaaggcctgttaaatcaccaaaatacatctatgaaatcgggaacggtgtagatctggtaaccacaacatttggtcacacaatcgatattttacaatacatgacaagttcgtacttttccaggataaatgcaatggttttcaataatattccagagcaagagctgatagatgagcgtggtaaccgattgggccagcgagtcccaaagacagtaccggatcatcttttattccaaggcacattgttaaatggcaatgttccagtgtcatgcagtttcaaaggtggcaaacctaccaaaaaatttaccaaaaatttggtcattgacattcacggtaccaagggagatttgaaacttgaaggcgatgccggcttcgcagaaatttcaaatctggtcctttactacagtggaactagagcaaacgacttcccgctagccaatggacaacaagctcctttagacccggggtatgatgcaggtaaagaaatcatggaagtatatcatttacgaaattataatgccattgtgggtaatattcatcgactgtatcaatctatctctgacttccacttcaatacaaagaaaattcctgaattaccctcacaatttgtaatgcaaggtttcgatttcgaaggctttcccaccttgatggatgctctgatattacacaggttaatcgagagcgtttataaaagtaacatgatgggctccacattaaacgttagcaatatctcgcattatagtttataaaagcatcttgccctgtgcttggcccccagtgcagcgaacgttataaaaacgaatactgagtatatatctatgtaaaacaaccatatcatttcttgttctgaa

SEQ ID NO: 2388 - DNA, 1029 bp, Saccharomyces cerevisiae
actaagtatagtaacgcatatccgcacaatactatggttaaggtctggaatatagtactacgtctggtagtgttgctgtttttagcaggtaataccttgctgttaattttgatgattatatctggtgccacggaccattaccccgtgaacagattctattgggtgcagggcaatacaacaggcatacctaatgctggggatgaaacacgttggacgttttggggcgcctgtctacaggataaagacgggtcggatacctgcacaagcaatttggcacctgcataccccatttccccagtagataacttcaacacacacatcaatgtccctcaccagtttatttccaaaagagacgctttttactacctgactagattttcattttgtttcttttggattgcgcttgcctttgtaggtgtgtcgtttatcctttacgttttgacttggtgctcgaagatgctttcagagatggtgcttatcctcatgtcttttgggtttgtcttcaatacggcagccgttgtcttgcaaacggccgcctctgccatggcaaagaatgctttccatgacgatcatcgtagtgcccaattgggtgcctctatgatgggtatggcttgggcaagtgtctttttatgtatcgtggaatttatcctgctggtcttctggtctgttagggcaaggttggcctctacttactccatcgacaattcaagatacagaacctcctccagatggaatcccttccatagagagaaggagcaagcaactgacccaatattgactgccactggacctgaagacatgcaacaaagtgcaagcatagtggggccttcttccaatgctaatccggtcactgccactgctgctacggaaaaccaacctaaaggtattaacttcttcactataagaaaatcacacgagcgcccggacgatgtctctgtttaaatggcgcaagttttccgctttgtaatatatatttatacccctttcttctctcccctgcaatataatagtttaattctaatattaata

SEQ ID NO: 2389 - DNA, 612 bp, Saccharomyces cerevisiae
tattgtaaggaaaagagacgcctgttcaagatgagttctgctaaacctattaatgtatattcaatcccggagttgaaccaagctttagatgaagccctaccttctgttttcgcgagattaaattacgagagatcatacgctttactcgatgctaaattgtacataggttattccatagctgttgtagctggtttgagtttcttcttggataaaaaatttgagagagatcagattgttacgtatcaaaagcttttggtaggcgcatattttgtgctctcgctacttttctggtatttctctcgttttattgaaaaggggactgtttatgtgggaaagagaagaggtacaaaggaggaaatatatgtaaagacaaagttcgaaaagaacgaaccattatatctggttgagcttgttcagaaaaaaaagggagaaaactccaagaaggagttgaaggcaaaattagaagtgaataaggtttttaatgaaagtggatatttacagaacgatgcgtattttaagtggttctctgaacagcacaatgtcctcgacaccaaaaaaaatgaataaataatgtataaaacatataactttgcaaatgattcaaaaattcaa

SEQ ID NO: 2390 - DNA, 1927 bp, Saccharomyces cerevisiae
atgtcttcagacgctataagaaatactgagcagataaacgccgctattaaaattatagaaaacaaaacagagcgtccgcaatcgtccacaacccctatagattcgaaggctagtacagttgctgctgctaattccacggccacagaaacttccagagaccttacacaatataccctagatgacggaagagtcgtatcgacaaaccgcagaataatgaataaagtgcccgccatcacgtcacatgttcctacagatgaagagctgttccagcccaatgggatacctcgtcacgaattcctaagagatcatttcaagcgcgagggcaaattgtcggctgcgcaggcggccaggatcgttacacttgcaacggaactcttcagcaaagaacccaaccttatatctgttcccgccccaatcacagtttgcggtgatatccatggccagtactttgaccttttgaagctattcgaagttggcggagatccggccactacatcgtatttgttcttgggagactatgtcgacagagggtccttttcgtttgagtgtcttatttatttatattctttgaagctgaattttaacgaccatttctggctactgaggggtaaccacgaatgtaagcatctaacgtcatatttcactttcaaaaatgaaatgctgcacaagtacaatctagatatttacgagaaatgctgcgaatcgtttaacaacttgcccctggctgcgttaatgaacggacagtatctttgtgttcatggtggtatatctcccgagttaaactctttacaggacattaacaacctaaatagattcagggagattccctctcatggcctgatgtgtgatctgttgtgggctgacccgattgaagagtacgacgaagtcttggataaagacttgactgaggaagacatagtgaactccaaaaccatggttcctcatcatggcaagatggcaccttcaagggatatgtttgtcccaaactcagtaaggggctgttcatatgccttcacgtatcgtgctgcgtgccattttctgcaagagactggcctgttgtccatcatcagggcacacgaggctcaagacgctggttatagaatgtacaaaaataccaagactttgggctttccctctcttttgacccttttcagtgcgcctaactacttggacacctacaataataaggctgccatattgaaatacgaaaataatgttatgaatatcagacaattcaacatgactccacacccctattggttaccagatttcatggacgttttcacgtggtccttgccatttgttggtgaaaaagttacagagatgcttgtcgcaattctaaacatctgtactgaagatgagctggaaaacgacacccccgtcattgaagaattagttggtaccgataaaaaattgccacaagctggtaagtcggaagcaactccacaaccagccacttcggcgtcgcctaaacatgcttccattttagatgacgaacatcgaaggaaagccttacgaaataagattctggccgtcgccaaagtttccagaatgtattctgttctcagagaagaaaccaataaagttcagtttttaaaagatcacaattcaggcgtgttgccacgtggcgctttatctaatggtgtaaagggtttagatgaagccctgtctacctttgaaagggcaagaaagcacgatttaattaatgaaaaattaccgccttcactagacgaactgaaaaacgaaaataagaagtactacgaaaaagtttggcagaaagtacatgaacatgatgcaaagaatgatagcaaatagagaaagctcctatttccactgtacatacttcaataagtaagtaagttgcattaattatctatttagaagctagatgctcctcaaatgcacagaatcatatagcgttttatta

SEQ ID NO: 2391 - DNA, 585 bp, Saccharomyces cerevisiae
tctcttcaactgctcaataatttcccgctatgcaaaattcccaagactacttttacgctcaaaatcgctgccaacaacaacaagccccttccacattgcgtaccgtgaccatggcggaatttagaagggtgcctttgccacctatggctgaggttcctatgttgtctactcaaaactccatgggcagctccgcttctgcctccgcttcttcattagaaatgtgggaaaaggatttggaggagagactcaactctatcgatcatgacatgaacaacaacaaatttggttctggcgaactaaaatctatgttcaaccagggtaaggtcgaggaaatggacttctaaagttcctttcatactcttttcttttctctttccatttcccactagttctgttcttttcttctcttagatacccttcttttcagggactctcgtcctactattgttgtcattctcgaaacattctctcccgtgcattttcctttccctttatatacatatatatatatatatatatatatgtctcttctacgtatttttgtatttctgtgtctttatcaaagatagtctataatacgtttga

SEQ ID NO: 2392 - DNA, 861 bp, Saccharomyces cerevisiae
caagcaaaaaaccgatctagactaatcatggctgttggtaagaataagagactatccagaggtaagaagggtttgaagaagaaggtcgttgacccatttaccagaaaggaatggttcgatattaaagccccatccacttttgaaaacagaaatgttggtaagactttagttaacaagtccactggtttgaagaatgcttccgatgctttgaagggtagagttgtcgaagtttgtttggctgacttgcaaggttctgaagaccattctttcagaaaggtcaagttgagagtcgatgaagttcaaggtaagaacttgttgaccaacttccacggtatggacttcactaccgacaaattgagatcaatggtcagaaaatggcaaactttgatcgaagctaatgttaccgttaagacttccgatgattacgttttgagaatctttgctattgccttcaccagaaagcaagctaaccaagttaagagacactcttacgctcaatcttcccacatcagagctatcagaaaagttatttctgaaatcttgaccagagaagttcaaaactctactttggctcaattgacctccaaattgattccagaagttatcaacaaggaaatcgaaaatgctaccaaggacatcttcccactacaaaacatccacgttagaaaggttaagttattgaaacaaccaaagttcgacgttggtgctttgatggctttgcatggtgaaggttccggtgaagaaaagggtaagaaggtttctggtttcaaggatgaagtcttggaaactgtgtaaacaaaataaatataaattataagatttgacatgtacacaatttattaatatgttttctctttatta

SEQ ID NO: 2393 - DNA, 1802 bp, Saccharomyces cerevisiae
gtaagaacaagaaggaaataccgttaacaagtgaaggaacaatctagtattgttgaacaagaattatgagtaccgactttgatagaatttacttgaaccaatctaaatttagcggtagattccgtattgctgattctgggttagggtggaaaattagtaccagtggtggctctgcagcaaatcaggcaagaaaaccatttttattaccagccacagaattatctaccgtccaatggagtaggggctgcaggggttacgacttgaagataaataccaaaaatcaaggtgttatccaactagatggattttctcaggatgactataacttaatcaagaatgatttccatcgccgttttaatattcaggtagagcaaagagaacattccttacgtggttggaactggggtaagacagaccttgccaggaatgaaatggtttttgctttaaatggtaaaccaacttttgaaattccttatgctagaataaataatacaaatttgacctctaaaaatgaagtaggaatagaatttaatattcaagatgaagagtaccaaccagccggtgacgaattggtagagatgaggttctatattcctggtgttattcaaacaaacgtcgatgaaaacatgaccaaaaaggaagagtcaagcaacgaggtcgtaccaaagaaagaagatggtgctgaaggagaagatgtacaaatggcagtagaggaaaagagtatggcagaagcattctatgaagaactaaaggaaaaggcagacatcggggaagtcgctggtgatgcaatagtttccttccaagacgtcttttttaccacgccaagaggtcgttatgatatcgatatttacaagaactccattagactcaggggtaagacctatgaatacaaattgcaacatcgtcaaatacaaagaattgtttcgttaccaaaggcagatgatatccatcacttattggttttggcaattgaacctcctttacgtcaaggacagaccacctacccctttcttgtcttacaatttcagaaagatgaggaaacagaagtgcaattgaatctagaagatgaagattatgaggaaaattataaggataaattgaaaaaacaatatgatgctaaaactcatatagttttaagtcatgtattaaaaggtctgactgaccgtagagtcattgttcctggagaatataaatccaaatatgatcagtgtgcagtttcatgttctttcaaagcaaacgaaggttatttgtatccattagataacgctttcttctttttaactaagccaactttgtacataccattcagtgatgttagcatggtaaacatttcaagagcaggacaaacttctacgtcatcgaggacgtttgatttggaagtggtactgcgttcaaatagaggttctaccacttttgccaacatcagtaaggaagagcagcaattattggaacaattcctaaagtctaaaaacctaagggtgaagaatgaagatagagaggtacaagaaaggttacaaaccgctttaggttcagacagtgacgaagaggatattaatatgggttccgctggtgaagatgatgaatcagtagatgaggattttcaggtcagctctgataatgacgcagacgaagttgcagaagagtttgattcagatgcggctttaagtgatgctgaggggggtagcgacgaagaaaggccttcgaagaagcctaaggtagaatagtaataattttagactgtataagttaaatttattgatattgtgtaaaaactaactaatatattttgccaattgatatta

SEQ ID NO: 2394 - DNA, 1881 bp, Saccharomyces cerevisiae
caactgtaaacgaacacatcaaagaataagattacattctatatctaagactaaattttaaatgtccgctaaatcgtttgaagtcacagatccagtcaattcaagtctcaaagggtttgcccttgctaacccctccattacgctggtccctgaagaaaaaattctcttcagaaagaccgattccgacaagatcgcattaatttctggtggtggtagtggacatgaacctacacacgccggtttcattggtaagggtatgttgagtggcgccgtggttggcgaaatttttgcatccccttcaacaaaacagattttaaatgcaatccgtttagtcaatgaaaatgcgtctggcgttttattgattgtgaagaactacacaggtgatgttttgcattttggtctgtccgctgagagagcaagagccttgggtattaactgccgcgttgctgtcataggtgatgatgttgcagttggcagagaaaagggtggtatggttggtagaagagcattggcaggtaccgttttggttcataagattgtaggtgccttcgcagaagaatattctagtaagtatggcttagacggtacagctaaagtggctaaaattatcaacgacaatttggtgaccattggatcttctttagaccattgtaaagttcctggcaggaaattcgaaagtgaattaaacgaaaaacaaatggaattgggtatgggtattcataacgaacctggtgtgaaagttttagaccctattccttctaccgaagacttgatctccaagtatatgctaccaaaactattggatccaaacgataaggatagagcttttgtaaagtttgatgaagatgatgaagttgtcttgttagttaacaatctcggcggtgtttctaattttgttattagttctatcacttccaaaactacggatttcttaaaggaaaattacaacataaccccggttcaaacaattgctggcacattgatgacctccttcaatggtaatgggttcagtatcacattactaaacgccactaaggctacaaaggctttgcaatctgattttgaggagatcaaatcagtactagacttgttgaacgcatttacgaacgcaccgggctggccaattgcagattttgaaaagacttctgccccatctgttaacgatgacttgttacataatgaagtaacagcaaaggccgtcggtacctatgactttgacaagtttgctgagtggatgaagagtggtgctgaacaagttatcaagagcgaaccgcacattacggaactagacaatcaagttggtgatggtgattgtggttacactttagtggcaggagttaaaggcatcaccgaaaaccttgacaagctgtcgaaggactcattatctcaggcggttgcccaaatttcagatttcattgaaggctcaatgggaggtacttctggtggtttatattctattcttttgtcgggtttttcacacggattaattcaggtttgtaaatcaaaggatgaacccgtcactaaggaaattgtggctaagtcactcggaattgcattggatactttatacaaatatacaaaggcaaggaagggatcatccaccatgattgatgctttagaaccattcgttaaagaatttactgcatctaaggatttcaataaggcggtaaaagctgcagaggaaggtgctaaatccactgctacattcgaggccaaatttggcagagcttcgtatgtcggcgattcatctcaagtagaagatcctggtgcagtaggcctatgtgagtttttgaagggggttcaaagcgccttgtaagtacttggctcacgaatacatatcaagatacttatgatatatatatatagaaaaagcttactttt

SEQ ID NO: 2395 - DNA, 608 bp, Saccharomyces cerevisiae
atggggatatattcattttggatctttgataggcattgtaactgtatatttgatagagaatggacattggcgtccaatagcgcaagtggtacaataaactccaaacagaatgaagaagatgcaaaacttctgtatggtatgatattttcgttacgctccattacacaaaagctctccaaagggtctgttaaaaatgacatacggagtatatctacaggaaagtatagagtccacacatactgtacagcttcagggctatggtttgttctattgtccgactttaaacagcagtcttacactcaggttttacagtatatttacagccatatttatgtcaaatacgtgagcaacaacttattatcaccgtacgatttcgctgaaaacgaaaatgaaatgagaggtcaagggacaagaaagatcaccaatagaaactttatatccgttctcgagtcatttctagcaccaatggttaatcagtgagcacgaaccatgagcagaagaaaaacctaaaataaatagaagcgatgaattgaattgcattcatcgtatatatacctaaggataaattaattagttttacatattttaaactttgtttgttaatacaa

SEQ ID NO: 2396 - DNA, 699 bp, Saccharomyces cerevisiae
atgtttaaacgttccatcattcaacagtcccgcttattctccaattctgcttctagactaggtaaaaaagtgttctttgatcctgcggtcaatggaaccaaaatcggcagaatagaatttgaattatatgataatgtggttcctaaaactgctgaaaatttcagagccttatgtaccggcgaaaagggctggggctataaaggtgtccctttccacagaatcatcccagacttcatgatccaaggtggtgacactgatttgactaacggttttgggggcaaatccatttacggttccaagttcgctgacgaaaattttgtcaaaaagcatgacaaggcaggtttgttatctatggcaaatgctggaccaaacactaacggttctcaattcttcattaccactgtgccttgtccatggttggatggaaaacacgttgtctttggtgaggtaaccaaaggtatggacattgtcaaagcaatcgaatcatacggtactgcttctggtaaaccaagagctgaaatcgttatcgaagaagctggtgagttatgaaggcttatatgaagctaaggtctctcatatttctagcatataaggtatgcgttatctctatgtctacgaattatatctgtttatagtgttttattttatatagactcgctggctcataaaaaatcaaccaacttttattctggtttgcct

SEQ ID NO: 2397 - DNA, 696 bp, Saccharomyces cerevisiae
agaattcgccatagagagcatgtcagccaatgtacaagaagctgcaaatgcagctatagagccggccagtttcgttaaagtcccaatgcctgagccaccaagtagtttgcaacaattgatcaatgattggcaattaatcaagcatagagaaggtgggtattttaaggaaacagataggtctccctacaccatggaagtagaaaaaccagtaaatggaggctcaggtaatactgaaatggtaacaagaaatcaatctacgttgatctattatctactaacccccgacagcccaattgggaaatttcataagaatattaacaggatcatacatatcttacaaagaggcaagggtcaatacgttctagtatatcctgatggtcaagtgaagtcatttaaagttggttttgactataagaatggagaagtctcgcaatgggttgtccccggaggtgtgtttaaggcaagtttccttctgccaaacgaagaatttgacaacggtttcttgattagtgaagtagtggtaccaggttttgactttgaggaccataccttcttgaagggtgaagatgaactgaaacatcttgtgggacctgaaaaggcagctgagttagcttttttagcttgaacttttgtacttagttattatcaaaataaccaataagaattattttagtcctttcgcaccgcgattattaa

SEQ ID NO: 2398 - DNA, 1493 bp, Saccharomyces cerevisiae
caagcaaggtgatcgtcaaactgcactcacgcacacatagatttttagctcccaaagtgctatcgtctatactatccaagtttttacaggctcgcaataagctcaataaacaatatcaactgcatatgactgaacctgccctgagtagcgctaataacgctctgatgcaaaaactaacaggtcgacaactttttgacaagatcggccgtcctactaggatcgttgcaccaatggtagaccaatccgaattagcatggcgtattctatcgagaagatacggtgcaaccttggcgtacactcccatgttacatgcaaaattatttgctacctcgaagaaatatagagaagataattggtcttccttagacggctctagcgtagataggccgttggttgtacagttctgcgctaatgacccagagtatctattggcggcagctaaactggtggaagataaatgcgatgcggtagatttgaatttgggctgtcctcaaggcatagctaagaaaggtcactatgggtcatttttgatggaagaatgggaccttatacacaatttaatcaacaccttgcacaaaaatttgaaagttccagttacagcaaaaatacgtatatttgacgactgtgaaaagagtttgaattacgccaagatggtgctggatgctggagctcaatttttaaccgtccatgggagagtaagagagcaaaaaggacaaaaaactggtttagctaactgggaaacaatcaaatacctaagagataatttacctaaagaaaccgtgttttttgctaacgggaatatcttatatcctgaagatatttcacgttgtatggaacatatcggtgctgacgcagtgatgagtgctgaggggaacttatacaatcctggtgttttcaatgtaggccaaactaagaacaaggagaagatatttccacgcgtagataagattatcagagagtatttccagattgtcaaagaatgccaggaatctaaagcctccaagacagcaatgaaatcacatttttttaagattttaaggcctttcttgccgcatcatactgatattaggtcaacacttgctactatgaatgcaaaagccacgtgggaagaatgggaggaacaagtagtgaagcctgtcgaaaaagtagtgcaagaaatatttgaacagccagatatcgctattaaggatgaaattactatcggcgaaaagcaatcatggggtggttcatatagaactgttccatactggagatgtcaaccatattttaggcctgttaacggtatcacaggtgataaaagagttatgcaaggcctcatagatgaaagcgtgaacaagaaacgtaaagctgacgtgccattagaatctgctgataaaaagaaggacgtgaaagcttaaaacctgataaaatccatgtatatttctttgccttttctattcttttctctaagtatagtttttatgtatgtatattaattcaaacagaaaatgttc

SEQ ID NO: 2399 - DNA, 3927 bp, Saccharomyces cerevisiae
accacggataccctgggtaaaataaaagcccagttgtcttctgttctatcagcagcgaatatttcagcttcttgtaattgtacgttgcatctgccatgtcatcggaagaattcaaaggacttccgatcaaacgagatatatcctccactatctatgctgatagacctccagcattatctgctcctccgtgcgttggtgctactgggaatgataaaatacaagtactaccgatccccaagaaatctaggactatcaaaaccgataagccaagacctttcctatgccacatctgtacaagggggttcgtgagacaagagcatttaaaacgacatcaaagagcacatacgaacgagaaaccctttctctgtgtcttttgcggaaggtgttttgcaagaagggatctggttttgcggcatcaacataaactacactcagcactggtttctaaagaatctataaactctaaggataaaactgaaatagatgctatcaatgataagaatataattcagattcaaggcaataagcaaacaattttaccaacgcctagcaatccgctagcaaagacggcagtacagttgaaaaaagccgccaaagagaaaaaaaatggtaagcaaggcaaattagacctgagtccttcatacggggcaaataatcatagtacagacgtttcaccgtcagtggggaactcatcaacacctgctgtaatcgaagagacagactcgtcttcccattttccgcttccagatacaaatattccgaccaaatcaaagaggcatgcatcattttcggcatctagcgcattcacatatagttcagataactttcaaaagctacatcaacaagcaaaatcggattttgatgaactacaggaaagtatccctcaccaagtgggattttctacaccccaattaacggcacaacaacttatagaaaatgctattgaatctggtgttgtggacttggaaactttggatttaccgccatttttatcgttagatggcttaccacccgcgagctcaagtgctgctgtagcagcatccgagcagatagatatctgtccctcctctgcgacagacactatctctggcgctaacagtactccaaaccaagcagcaacagctcctccttttcaattaccaatagcaagggaaagcagttccttgtttttggcaaataccccttatttatctgactttttaacaatgggatcttcctatggtggttctggagggtttgccaaatctatcactgctgatcccagtttggactatttcaactacaaaaaccattcgcatccagattcaaggcataacaacagctccagcggtatcaattatagcaataataaaaacaacaatgaatcaattgaaaaatctcaaaacaacagtaacgtaatcaatgaaactattgaccacactgacatccatgcccatcacgcggatgctcatgatgactccttcatagaaagtgaagagtggctctctaagtttattatggactctcagattgataatgatcttaaacttaatataaaccattttaacgatattgggtttaacaatttacaccctcaaaatcctacgacccattctgaaccaagaaatatgcataatgaaaacagagatatgcaccgatctgcaagcaaatttcaatctgtatcggaaaacatctctccaagggaacaaatgtctttgtttaaaactaaacagaacaaggccatttcaaaatttctgtctgacgagaaaattccttcaactgcgtcaccatcttcctctgcttcgccagttcagtttgataaaaaaaatgttgacatcaatgaatttttactggacgagtccgtgtccaacttattcacgactaggcaaattgatttattcaagaaaaatgtgaacttatattcaccactatttcaaaatcaaaaagacgcagtctcatctacaagcctgacgccatcgttgactacacaaactgcaacgacacaatcggggccagggtggacagattcctcccaaaagctgactttctttacagaacagttgagaaatttaattattaaagaaaacaatctaaagtctaatctctttcccactgttgatgaactgaatcattatgtcgatttatatcaagtggaatttcataaatatttcccctttattcatttatactcaattataccatccagtgaaaactatcctttagtaatatccatcagtatgattggtgctctttacggatttcattccacacatgcactactattgtcgaaaatagcaaggacgagagttagaatgttcctagaaaatactcgaagcaatcatgataagacaccaatttggctaatgcaatctttagtcttattaacgtttaccagcattttctccaatgatatgaatgcctttagaaccgtgaatacccagataatgattttggttcagttgattaaaatttcaaagttgaattacccattagaaaacttcattaagccaccgatcgaaagtgaccatgttttagaatatcaagataaccccgctgttttgaaccagttcaaggctcaatacaatacccgtgaacaaataaacagaaatttcaaatattttatcttagcacaatcaagaataagaatatgccacatagtcctgctgatttctaacctctttaaatccttagtggatttcgattgttgttttcattccatagatttgaagtgtggtgttccttgttacaacgaggtactgttcttttgcgaaaattcaagaacttggaatgagaacttgacgagattcaatatcgttttggattccaagttttccctaattgaagtatctaatggtgaatcaaactacgagaagtgcttgatgtatttgtcaaacggtaatccttatctttataaaaacgctaaaatctcattcaagactttgctatctttactgatctctattcatgaaaagataaacatcgaaagagatgcgttgaaagatagttacgaaagcgatttccatgcgaagaatgttcagtggcggatgcattcaagacccttggtcgccacaatgctaaaacattgggaactactttacatcaaaaatggtgggatattggctctcagtgacgaaaacctgccaataataaatactaatccgtcgtttagattgataattcccttgtacttctttgcaaagctaaggaagtgccttgatattgctccaacactaagatgcatttggaaccaagactggaactcaatgaatagctctttagaaaaagtgtgctacgagcgggaatcactacgagaggccacagagtacgctgtatccgttatcactttctggattgatactgtctctgtaatgaagggtaaatcgacacagactccaatcttcaccattacttgtatttttgtttcgatattggtcatagcggggtacatgaggagattggaagactttgctcaaaacaaaaacagtgattgtatgattggtagtttaaaaagcactgacaggatcttgtggttaaaagcattcaaaactttgaagaggatcgaatcacatttatctgaaagagagtataaattacaaacatttgctgagtttttaagggttccagataatggcagtcttgatattgagagtttggactcatccttaatagagaatactttgaattcacatgatgttaccaatcaagcgctggacataatcacgagaacaagattgtcatcaagaacattgtattgcggtgctagaattcttggcgatacaccagtctggcccgtatctctgttgtttgctcatgccttacaatctagggctatttacaatatcaaccacaggaaatctgtaaacagtgtatagactttagatagatatttagcatatccgtatgtaacattatattagttctttagggcaaattgaaaaatttaatcat

SEQ ID NO: 2400 - DNA, 2190 bp, Saccharomyces cerevisiae
acctttatcaggtggccgacactagggaataagacagcatggagcggcctggcttggtattgcaggaccttccacccgaaatcctgataaacatcttttctcacttagacgaaaaggacttgttcacgttgcaagaactttctacgcatttccggaacttaattcacgatgaagaactttggaagaacctgtttaagtctagagttcacacgactcatttccccacattttctcagtcttcgaaatttagtgtagagtatattgaaaggacacggggtcttcatcattggcagcataacaaggctataagaaccaaatacacaataattccgacgagaaactgggatcagcccagtatagaacgcatagtgtttgattatccacgagttgcagcttataatgatggtaccattacaattttacagttacaaaatcacaaaaggcagaagaaatttaagaaattgatttatattccatgtacaacaccacaaggttgttctaccatggacttcaatattaatgctgcagtgtttggtaggtttgacggcagagtgtttggaaaactgctaagtaacaaatcgtacttaacgcccgtgatggaatttacgggaaggcatagtgcaggcgttactgccatttgtaattcagaatcctgggacacgtcaagagaggactggtctgttagtggctctgaaaacggtgaaattatatggtggtgcgaaaataagcttgttaagatgtggaaggtttctaatagggtaatttggaaactggctttttttaaagattggaccttaattatggatgatgaaaagctgtacattatccatcaaatgcaggaattgcacagtattgatattcctaaggatctggacgaacagcctatgagggtacggtttttcaagatggatttcggttccatgactttggtacttgctgacctgaataacgtttatacaatatcggtcaatcccaatggtaacttcggcaatttgagaaagttggagatgcctgaacaaatatgcgcagttgaaatagatgaaaaaacttctcaaagggaacaaaactggcaatttgctggtgatgacggctgctatatcagtcttttgacgacacagaacactttatacattatcaatataagagatctttcttcgtcaggcttaaaagttcaatgtaagataagttttgatgagcaggtatacgtatcgcaggtgacaaatttaatagttgtggtagcattgccaaatgttcttcaaatattgaacgcgatgacaggcgagttaataaagacagtgttgaaaaccgagaagtttcccgaatttttgaaggtatcgcaggataaaatcattatgggaagcggtaacgttttgaattatttaaagtttgtttcaagtgattcaaagaaacatcaccattccactaaaggtaaaaacacagtaagcaataagtggaatgaaactttgaacacggagctgcaatattatgatgaagatgaagaccttagaagaaaaagacagtcagaaatatcaagattgatcgatgcgtatggtggagaccttgaactttcaggcgacaccgatgaagaaaacgacattcagttgagaattgcactcttagaatcacaggaggcgcaagcacggaatcaagctgaagcgggggagcctgtcggagatgatgaagatgagcagttaagaagggcgctggaggaatctcaactgatatatgagacgcaaacgaatagctctgcgaatcatggtaataatacgaatgatgagatagatgaagatgatgaagagtttctcagagccatcagacaatcaagagtggaggacgaaaggagaagacatcttagaaatcatactacaggtcgacgaaatgggcccttgagcgacgataattttgctacatatggtgcagcagagtcatccgaacgaacctcaactgagaacactatcggtagttctgttggcgttgatgctagtaataatgttgatgaagacttacaattggccattgcgttgtcattgagtgaaatcaattgaaagtatgtacatttggaagagcatatgttaaatattttatttatagatttttcgttgtgaaatattatttttttttttttgaaaaaaatgtcggactttattcctcctaattattaataaaatacgaatatatatctaaatataa

SEQ ID NO: 2401 - DNA, 588 bp, Saccharomyces cerevisiae
atgtcctctcaaaaaatcgatttaactaaactaaatcccgagcagctgaatgctgtaaaacagcaattcgaccaagaattgcagcatttcacacagtccttgcaagcattaaccatggctaagggcaagttcacagaatgtattgatgatattaaaacagtctcccaagcaggaaatgaagggcaaaaactactggttccagcatctgcatcattatacatcccaggtaagattgtagacaataagaaattcatggtcgacattggtacaggatattacgttgaaaagagcgctgaagcagcaatcgcattttaccaaaagaaagtagacaagcttaacaaagaatctgtacagatccaagatattattaaggaaaagacccagtattccttgtccatcgaggcccaaataagacaagccgctattagacagcatgaagcgatgagtaaacaacaacagcagcaacaaaaaaaggagtcgtctacagcctaggtaactcttttgcttttcctacgatttttcatatctcatttgtagccatctgatatacgtttatctatatgcaacgtaattttttatttatcgtca

SEQ ID NO: 2402 - DNA, 1693 bp, Saccharomyces cerevisiae
ctatgagacatgtgcgggattctattgcattattgtccaaacaataactacctgaatgatgagttaatcgaatttccagaaggaactgaatttggagatacaacatgtaccaatgaatcgtcgattttcaacaaaatcattccgtacatagccgcaagaggtccaaactactcctctcttcgagctgtcaaagcttatcgaataagttggttttcttctgttttatctttgaggcagcctttcacgaaacagagtattaacgtggatgacagatatttcctacaattcaatggtgagttatacaataaagagatatcgcagggtgataatgatagtctttatattgcttctatgttgcagaatttgaaagagggtatgggcgttattgatgttataaaatcactggaaggcgagtatgcttatactatatatgacgtgaactcatccaaactctatttcggcagagatccaattggcaggcgaagtttgtcttattcggtcactccagacaacgaattgtacgtcgctagtgtaacggggtctgctgggtcctttcaagattgtataggtggagttatttatgaatatgatacacgaactaagttgttaaattccaatcagaggtcacatcttccatacgaagtgacatcagagatagatctgaatttcacatcattgtcagaggtgtctaaaaatttatatgctgtgctacgtgattctgtaaaaaaaagggtagagtccatacatcccaggcatattgaaaactctcctattgcggtactattctcaggaggaattgattgttcagtaatagtagcgttgatctgcgaggtgttgcaagaaaatgattataaatgtggaaaaccagttatagagcttctaaatgtatccttcgaaaaccccaggactggtctttttcccagtgatacacctgatagaaaactgtccattaacagtgcaaagactttacaaaacttatatcctaatgttgatatcaaactggttgaagttgacgttccttatgatgagtatttaaaatggaagccatttgttatcaatttaatgtatcctaaacagactgaaatggacttgtctatagccattgcttttttttttgcgtcgagaggtagaggtttcttaacttctctgaatggggaaagaacgccatatcagcgccatgggatagtgttattcagcggactgggagcagacgaactctacggtggatatcacaagtttgccaacaaaccaccccatgaacttgtggaggaacttacaaggcaaataaacaacatttatgatcgcaacctgaatcgtgatgataaagtgatagctcataatggcgtggaggtgagatacccatttttagatgaatatgttataaagttatctacagcagaaattcccattaatttcaaggttaacaaattaatccttcgaaaagttgcctcgcagtatttgaagttggatggaatatcatcagaaccaaaaagggccattcaattcggtgctaaaagcgctaaaatgacaaaggatggtaataagcatggaacagatttattaaaagaaaataggaattgttcataaattcaaatattcaatatattttgcagcttgttcaaaattaaatgctaaaagtagagtaaatccgttgaacatacatagttttgtaatgtcattaagggtatcttca

SEQ ID NO: 2403 - DNA, 739 bp, Saccharomyces cerevisiae
aactgcaacatgaaatccaaaaggtaacggcaggcgagggtgagctggataagatatgtctaggaagctgaaaaaaacgaatctgtttaacaaggatgtaagttccttgctttacgcttacggcgatgtgccgcagccactacaagctactgtgcagtgtttggatgaattggtatctggatatttggtggatgtttgtactaacgcattccatacagcccagaattctcagcgcaataagctccgattggaagatttcaagtttgccctccgtaaagacccgataaagcttgggagagcagaagaactgatagctactaataagttgattacggaagctaagaagcagttcaatgagacagacaatcaaaattcattaaagaggtacagagaagaggatgaagagggtgacgagatggaagaggatgaggatgagcagcaggtgacggatgatgatgaggaagcagcgggccgtaatagcgctaaacaatcaacagattcgaaggcaacaaagattaggaagcaggggcctaaaaacctcaagaaaacaaaaaaatgatatagctacttggcaggcccgtttacgtaggcttgattcagatatacgtagtacatatgtccctttgatttattaattaggcgtttgctctataaaaggggttttgagtttgcgttggtgctgaacaaaaacacttgtcattacaatggcacaattttgaatgcattgttttcttattta

SEQ ID NO: 2404 - DNA, 3462 bp, Saccharomyces cerevisiae
aaaaaaccaaacaaagcaaagaatacaatagcaacgcaagatcaacacaatggctctcatcgtggcatctttgtttttgccctaccaaccacaattcgagcttgacacctctctccctgagaactcgcaggtggactcatctctcgtgaacatccaggctatggccaatgaccaacagcaacaacgtgcgctttctaacaacatctcacaggaatcattggtcgcgccagcaccagaacaaggtgtccccccagcaatctcaaggagtgccaccaggtcacccagtgctttcaaccgcgcctcgtctacgacaaatactgccactttagatgatcttgtctcttcggacatattcatggaaaacttgactgcgaatgcaactacctcacatacgccaacaagcaagactatgcttaaaccccggaaaaatggttccgtggaacgattcttctccccttcttccaatattcccacggatcgcatcgcatcgccaatccagcatgagcatgactccggttcgagaattgcttcgccaatccaacagcaacagcaggaccccacgaccaacttattaaagaacgtcaacaagtcattgttagtgcactcactgttgaacaacacctcacaaactagcctagaaggacccaacaaccacattgttaccccgaaatcgagggcgggcaacaggcctacttcggcggctacttctttagttaataggaccaaacaaggttcggcctcctctggatcttctgggtcttctgcgccaccttccattaaaaggattacgccccacttgactgcgtctgctgcaaaacagcgtcccttattggctaaacagccttctaatctgaaatattcggagttagcagatatttcgtcgagtgagacgtcttcgcagcataatgagtcggacccggatgatctaactactgcccctgacgaggaatatgtttctgatttggaaatggatgacgcgaagcaggactacaaggttccaaagttcggcggctattccaataaatctaaacttaagaaatatgcgctgttaaggtcatctcaggagctgtttagccgtcttccatggtcgatcgttccctctatcaaaggtaatggcgccatgaagaacgccataaacactgcagtcttggagaatatcattccgcaccgtcatgttaagtgggtcggtaccgtcggaatcccaacggatgagattccggaaaatatccttgcgaacatctctgactctttaaaagacaagtacgactcctatcctgtccttacggacgacgacaccttcaaagccgcatacaaaaactactgtaaacaaatcttgtggcctacgctgcattaccagattccagacaatccgaactcgaaggcttttgaagatcactcttggaagttctatagaaacttaaaccaaaggtttgcggacgcgatcgttaaaatctataagaaaggtgacaccatctggattcatgattaccatttaatgctggttccgcagatggtgagagacgtcttgccttttgccaaaataggatttaccttacatgtctcgttccccagtagtgaagtgtttaggtgtctggctcagcgtgagaagatcttagaaggcttgaccggtgcagactttgtcggcttccagacgagggagtatgcaagacatttcttacagacgtctaaccgtctgctaatggcggacgtggtacatgatgaagagctaaagtataacggcagagtcgtttctgtgaggttcaccccagttggtatcgacgcctttgatttgcaatcgcaattgaaggatggaagtgtcatgcaatggcgtcaattgattcgtgaaagatggcaagggaaaaaactaattgtgtgtcgtgatcaattcgatagaattagaggtattcacaagaaattgttggcttatgaaaaattcttggtcgaaaatccggaatacgtggaaaaatcgactttaattcaaatctgtattggaagcagtaaggatgtagaactggagcgccagatcatgattgtcgtggatagaatcaactcgctatccaccaatattagtatttctcaacctgtggtgtttttgcatcaagatctagatttttctcagtatttagctttgagttcagaggcagatttgttcgtagtcagctctctaagggaaggtatgaacttgacatgtcacgaatttatcgtttgttctgaggacaaaaatgctcccctactgttgtcagaatttactggtagtgcatctttattgaatgatggcgctataataattaacccatgggataccaagaacttctcacaagccattctcaaggggttggagatgccattcgataagagaaggccacagtggaagaaattgatgaaagacattatcaacaacgactctacaaactggatcaagacttctttacaagatattcatatttcgtggcaattcaatcaagaaggttccaagatcttcaaattgaatacaaaaacactgatggaagattaccagtcatctaaaaagcgtatgtttgttttcaacattgctgaaccaccttcatcgagaatgatttccatactgaatgacatgacttctaagggcaatatcgtttacatcatgaactcatttccaaagcccattctggaaaatctttacagtcgtgtgcaaaacattgggttgattgccgagaatggtgcatacgttagtctgaacggtgtatggtacaacattgttgatcaagtcgattggcgtaacgatgtagccaaaattctcgaggacaaagtggagagattacctggctcgtactacaagataaatgagtccatgatcaagttccacactgaaaatgcggaagatcaagatcgtgtagctagtgttatcggtgatgccatcacacatatcaatactgtttttgaccacagaggtattcatgcctacgtttacaaaaacgttgtttccgtacaacaagtgggactttccttatcggcagctcaatttcttttcagattctataattctgcttcggatccactggatacgagttccggccaaatcacaaatattcagacaccatctcaacaaaatccttcagatcaagaacaacaacctccagcctctcccactgtgtcgatgaaccatattgatttcgcatgtgtctctggttcatcgtctcctgtgcttgaaccattgttcaaattggtcaatgatgaagcaagtgaagggcaagtaaaagccggacacgccattgtttatggtgatgctacttctacttatgccaaagaacatgtaaatgggttaaacgaacttttcacgatcatttcaagaatcattgaagattaaattttaccattttaaaattttaattttcttgggtatgaacttttattttcaactgcttattatatatcaattctataaatttttttcttctctctaacgaccaattataaaattca

SEQ ID NO: 2405 - DNA, 1570 bp, Saccharomyces cerevisiae
acgttagttaactcgctgtctaactgatgggctattattatagcgttatagtacgtatcagaatttaaaagaaggaggcagaaaagcttagagcaaaggggcaggacaatggaagcttcacatttgcaaatctactggcatgattcacaacccgtttactcgctcacattccaaaagaacagtgcgaacgacaagcttttcaccgctggtggtgataacaaggttaggatatggaagttgaacagagatgaaaacggacaaaatgggggggtgcgtaagattgaaagccttgactttcttggctcgctgacgcatcacgaacaggccataaatgtaatccgattcaactcgaagggtgacgtactggcgtctgcgggcgatgacggccaagtgctgctatggaagcaagaagatccaaatacacagcaagaatctgtggtcagaccattcggaatggatgcggagactagtgaagcagacgagaacaaggagaaatgggttgtgtggaaacggctgcgtggtggtagcggtgctactgcggcggcagagatttacgatctagcgtggtcacctgataacaggaacatagtggtggcatgtatggacaattcgatacgactgttcgatgttggagctgggatgctggtatgcggccagtcggatcatggtcactacgtccaaggtgttgcatgggacccattaaatcagtttattctctcacagtctgcggaccggtctctgcatgtatatggagtcattctttcatctgcaggagtggttacagggctgaaacttagaagtaagattgccaaggcagaactgccttgtccaggtgatgtcctgaggacaaattacctttttcacaacgagacgctaccttcattctttaggcgatgcagcatatcgccttgtggtggtttggtcgtaattcccagtggtgtgtataaggtggctggtgatgaagtcgcgaactgcgtatacgtgtatactagatctggaatactgaacagcgctggtggcgttaaaaaccggcctgcgattagaatcccatctttgaagaaaccagcgctgatggcggctttctcgcccgtattttacgaaacgtgccagaagagtgtgcttaagctgccctataagctagtatttgccatagcaacgactaacgaagtactcgtgtacgacacggatgtattggagccgttatgcgttgtgggaaatatacattactcacccataactgatttagcatggtctgaggatggctcgaccctactaatctcatcaacagacggattctgttcgtatgtatcgatcgacacagaaacgcaattcggttcaaggatagagccgccagcgatgcatgcagagccactagacactgacgagagcgcggtagcggctaagaaccagcgcgaggcaggtgggatcgtgaacatgctgccggtgaagaagatcccctgcaatagtagcgatagtaaaaagaggcgcatacatcctacgccagtcgatttgtgatttttaatatatttaatgcggtacataagaatgcctaatctagtttgccagcgaa

SEQ ID NO: 2406 - DNA, 1050 bp, Saccharomyces cerevisiae
ggggtatttcaatcattgttccaactttacgttccttttttgaataaagacacttcttattattaacaggcttttatttgtcaaataagattcattcaaaatttccataaagcattacttctgcgatatactactaacggaattttggttgcgtattattgtgtctgacattgtatgaaggatacacaaaaaaattaaagattaagaaagttattcaaaatgcctattatgttggaagactaccaaaagaactttctagagttggccatcgaatgccaggctctaagatttggttcattcaagttgaaatcaggtagagaatcgccatatttctttaatttgggattgttcaatactggtaaattgctttccaatttggctactgcgtatgcaattgccatcatacaatctgatttgaaatttgatgtgattttcggtcctgcctacaaaggtatcccacttgctgctattgtttgtgtgaaattggcggagattggtggctctaaatttcaaaacattcagtacgcttttaacagaaaggaagccaaagatcatggtgaaggtggtatcattgtcggctctgccctagagaacaagagaatattaatcatcgacgacgtcatgactgctggtactgccattaacgaggcctttgagatcatcagtaacgccaagggtcaggtagttggctccataattgctcttgatagacaggaagttgtgagtactgacgataaagaaggactcagcgccactcaaactgttagcaaaaaatacggtatcccagtcttgagcattgtctccttaattcacataattacctatttggaaggcagaataacagcagaagagaaaagcaagatcgaacaataccttcaaacctacggtgcctccgcttaaaaatcagttttttaattaaatgatttatttatctcttttaagaactattaatcttagttactacgatacatgcacgccgctcatctatatatgtgtataaatagcgtatattcacacacatatatatagagcgagagagttttcttgtta

SEQ ID NO: 2407 - DNA, 581 bp, Saccharomyces cerevisiae
gcaaggctaccttgcggttgaattctatctcgtactacactaagacgaaagagaaaaacgaaatgtccaagagtaatacttataggatgctcgtcttactagaagacgacaccaagataaataaagaagatgaaaaatttttgaaaggtaagccgggaaaaatgcatgaatttgttgacgagttgatacttccatttaatgttgacgaactggacgaattaaatacctggtttgataagttcgatgccgaaatatgtataccgaacgaaggtcatatcaaatacgaaattagtagcgatggtttaattgtacttatgctagataaggaaattgaagaggttgtcgaaaaagtaaagaaatttgtcgaagagaataactgaaataatgatgttgcttcggttttttgcatgaatataacgtgactgttgcgtatgcatatgtgcacgtaatttaaagagagagtgacagaatctgcgcatcagcatgggggcatatacaagcatatgagaatttggataatgtattacatctaatttataaagtttgtagaacagcctctaatttatttagtctttctccca

SEQ ID NO: 2408 - DNA, 946 bp, Saccharomyces cerevisiae
tggagtttttgaacagatcaccttgtgaatctacaaactgtcctaaagtatattggagcaggacattgggtgatggcgaaaactttggcacaaggaaggaaacctggaagcggcagaaagcccggaaaagggaagacgttgagagagggaagaaagcctggcagtggtaggaggaggaggcaagatactgggggtaaagagaccgacgggtctcagcaagatcaggagtcgcgtcttattagttccagggacatggaagctgtggacgcactgagagagttgacgcacagcccgtcgtctcactcagctcataattcatcagcagcaccaccgccgcatgcagcagcggcgtcaacttcattgcctccatctctggattatacccatcagtcattcatggatcaacaacaacaacagcagcagcagcagcagcaacaactactacagcaacagagagtggacgtcgttccgcccaagccgttcatcacccacaagatcctgttatcttcaacgggaaactctggcggccacgtgaattcaaattacaacgccgaccacagcattaatcataattcaaaccacaaccttaacagcaacgtgaacgtgaacatgaactttactataaatgggagcaatcaagacccgtcatcttctttcctgatggggccctacaactacttacagcggcctttcattgtgaaaccatatcttgatctgtccacaagcacagcagcatcaaatcagccacggacgcaaccatcgccggcagcacatatcactaagaattccgattctacagagaaaaacgcaaccatatgacattcatttccagcataccactaaaacattcgtatatgccacataataactagttgagaaaaccatagatatttatatttatatgtatttgtacttctttgagcaatgtatatttaagactgatctc

SEQ ID NO: 2409 - DNA, 3405 bp, Saccharomyces cerevisiae
atgtcaaattccaattcaaaaaaacctgttgcgaattacgcataccgtcaacagcaagattataatgggatgaacgccatggtgggaaatccaatgatgtatcatcctgttgatttcgtaaacggtgccggccaatatggtccttctcaacacccagcatattacaccaactcaccattacctaatattccaccaacaccttttgatactgcatacggtgccagtctttttccatctcacctattgatgggatctccatttgtttcctcgcctaacatgcaaagtggctataattctgcaagatcatctaatctcaaaagaaaggcttattcgaggcccgtttctaatcataacggttacaacggaaacagtaacagtaaccaaaacaatactaataacggaatggtaacaccctcgaactattatagaatggggagaaattctttctcgaggaacaacaacagtacgaggaatgttactcacaacaacaataaggggtgcgacacccggaacaacagtggaagaagaacattcgcaaggaataacattttcgacgacatacttccagaaatgcttttacaaagacccttttgtattaattacaaggttctaccgactggtgatgatgcttatagaactaggtcgctgcttattgaaaatgtggatcattctattgatttacactctatagtcaaaaattttgtcaaatccaatactctggaaagtgcctacttaattgaaggagggaagagcgatgattcaaaagatgtagagactaaaaatctatccattctaataagctttctaaccaaaggcgactgtttgaacttttacaataacattttacaaaggttatctgaattcaaaacatttttgaaatctgaagcactaaatctgaaatttgtttgtctaaactatgatcccaaatgcctccctacctttattgagagtgaagcgttaacagaaaacgctgaagaagccgacattaccaatggttcaacaatgatcagtgcttcgctgcatcataatatagcgaacaaagatgctacaaggtcgattataattgaattcaaaagccccgtggagaaaagcgatttattcaaaaagaaattacaatttttggacaggtcaaaaaacaaaagatacattttggaatctatcgatttagtgaacacagatgtaccttccaatcaatttcctgaaaattacgccgttttaacctttttgaatatctctatggctattgaagttctcgattatttgaaaaaatactccaaaaacttaggcatttctaaatgtttttacgtatccctagccccgttggtagttagctcagccagatcttcggttgctaatatttacgagggtaaaacgagcacacatcgtttatcggtgccttctgttactgctgggaacaataacgatagcaacaacaacggaaacaataataaaagtaatatgagtggtatcaccacactcaataataatagtagtattggtgtttccgtatacggtcactctaatatgagtttaaccagtctgtcatcatctgtatctttaaatgaagagattgatatgcttgcgacgaaacttcaaggggtagaacttgatgggacttatttagaaatcaactatcgcgactatcaaacaccaactattgaagaacactctactcacttgagcaatgtcaaaatttcaaagacaacagaaaactctaggcaattttctcaagatatcccatcacctttgccattaaatgaacatatgtttatgaatgattctaatcagtccaatggagcgataatacctcaacagttaatagccacaccttctccggtatcccccaatttgcaaatgaatcaaagggtgttgccgaatccaataactcaaagtttggagcaaaatttcaacgtttcggccaaagtggcatcatccatgggttcagacataggcaatagaacaatttatataggaaacattaatccaagatcaaaggcggaggatatctgtaatgtcgtgcgtggaggaatccttcagagcattaagtacataccggagaagaagatatgctttgttactttcatcgaagctccatccgctgtacagttctatgcaaattcatttattgatccaatagtgttacatgggaatatgttgagagttggatgggggcattattctggtccattaccgaaattaatctcgttggctgttacgatcggggcaagtaggaatgtctacgtaagcctaccagagtttgcatttaaggaaaagtttattcacgaccctcagtacaaaaaattgcatgaaacactatctttaccagatgcggaacaactaagagaggactttagtacctatggtgatattgagcagattaactatttgagtgatagccattgctgttggataaatttcatgaatatatcttctgcgattagtcttgttgaagaaatgaataaggaatccacagtacaaaatgaatccggtgaagtgacgcttaaaagggcgactgaggaaaaattcggtggccgttataagggccttctgataaactacggcaaagatcgttgtggcaatataaacaaaaatttgatagcaggtaaaaattcaagattctataagaaagttaaaagaccgagctataatatacgtttgagtaagttggaagaaaagaggaggcagaatgaaatcgatgaaaaggaaaaggcttttgataaacccttgaacttggaatccctaggaattagtctggacgcacataaggacaacggcggtggtgaaacaggaactgcaaataatactgggcatgaaaatgaaagtgaactagaggctgaaaatgaaaacggtaatgagactggaagtttcggtggactgggtctcgctgtggcgagctctgacgtcaaacgtgcgacatcggatgaaactgattatgaagatatatttaacaagtcatcgggatcttccgactcgtcatcagacgtcgaggtcattatgcactccccgagcgatcctgaatacgctttaaaatcacaaactctaagaagctcgagtcagaccgtcattaatagtaagagaccagtaaagatagaagacgaggaagaagccgtaggaatgtcacagctcaattataggtcgtcattaagacaagctcctccaagagctccctcaactttgtcatataatcactcgaagaacaacgaaacgccaatgcaagatattttcacaaatggcgaaacagcaaataacagaaagaagaagagaggatcttttgcaaggcatagaacgataccaggatctgacgtcatggcccaataccttgcacaagtgcaacattcgacatttatgtatgcagccaatattttgggcgcctctgcggaagacaacacgcatcctgacgagtag

SEQ ID NO: 2410 - DNA, 1249 bp, Saccharomyces cerevisiae
ttttatccctcaattgtacatgaaaacagagacctttcaaaacgtattttaacattcttttactcttttcttgcacctgcagccttaggtcagtaagaaaaaaagtaggtagcaatgagcccaagtccatcagtgtcgccaagaaggacgctcaataacaaatcatcttacatcaataacagcggtgggctggtcctgcctcctacgcagtttaatttgaatcagcagccagtcctgagcttccaacaaaaagcgactttcgattccaaccagcagtttttctattatccagagtcacccacaaaaaacctgagaccaaggtttaacagtatttcgcaggttaataaaggagttaatgaagaccattataccgggggcggtagcagtaataataacaggccatctagatatacaaataccatgggcgctgcaaacaccaatgtaaattcccatccgcatcatcagtcggtgtcgcatttaaattctaaatctcttaaattcaatcaaacgaaggaagtgagcagcataaatgaaattatttttccttccagaacgtgtacaaagaaacggtattttaccaagccaattgatttgtatggtacaagaagtagcactagtgtggcacctaagttgacgaattctcccacgaaatcaaaaacaaatttcaacatcaagaagtgcatcttacctaggtccgtcgttaccacatataaattaccatctccagtgcacgaaacgatagacgatatatccaaaaaaatcataatcctgctaatttcgttgaagtttgagaaaaactatcacttcttgcaacctattcaattgtccacaaatagtaagacacggatctcaaaatcactagacgaattatgcggagtgcagctgacatcaacgttacggcaacaaaagcagctgcaaggtaacagcaagcccgtaaagaatctccctaattccaatgcgaagcagagagccggggccagtgtttccacaaatgccaacgaaagctttgaattgagttttgatggaaaggcaatggatagatctgatatatttcgaatggtagattcttttagcatcgccatttcagatgaagatgaggaagatgaggaggaggatagctttcagcagagaagtgcgaacaacagaatcctccctgcggagatactaagtaatgaacctttgaaatgatacggattctctgtattctgtctatagtatttatataccaatacatttttccgcactttga

SEQ ID NO: 2411 - DNA, 1250 bp, Saccharomyces cerevisiae
cgaagtgaaaagttcaatgtgggaccctaccctaaattgtgattatggtaataatttctttttgaataaatacaataggtatcttacacaggagtgaaggccatcaaaatcacgtttatcaatcgacaatttagtaatgtcgtcaaataataggaagaaactgcttctgatgggccggtccggctccggtaaatcgtcaatgaggtcgatcatctttagtaactactccgcttttgacactaggagattgggtgccaccattgatgtagagcactcccatttgagatttcttgggaatatgactctaaatctgtgggactgtggtgggcaggacgtgtttatggagaattatttcaccaagcaaaaagaccacattttccagatggtgcaggtgttaattcacgtttttgatgtagagtcaactgaagttctcaaggatattgaaatatttgcaaaagctttgaagcaattaaggaagtactctcccgacgccaaaatttttgttcttctgcataagatggatcttgttcagttggataagagagaggagctgttccaaatcatgatgaaaaacctgagtgaaacgtcttcggaatttgggtttcccaatctgataggttttcctacttcgatttgggatgagagtttatacaaggcatggtcgcagattgtatgctcgctaatacccaatatgtccaaccatcaaagtaatttgaagaagtttaaggagattatgaacgcccttgaaattattcttttcgaaagaacaactttcttagtgatatgctccagtaatggcgaaaatagtaatgaaaatcatgatagttcggataataataatgtcttgctagacccgaagcgattcgaaaagatatccaatataatgaaaaacttcaagcagagttgcacgaaattgaagagcggattcaagactttaatattgaacaacaacatctacgtcagcgagttatcgtccaatatggtgtgttttatagtgttgaaagatatgaatattccacaagaattagtattggaaaacatcaaaaaagccaaagagtttttccaatgactgaggtgagtagacgaaacattcggcaattgagtgtttgcggggcataagaattataaagctttcgttacgtatatacaaatgggatttggcgtataaaataaatagagaaacataagaggaagaaataaataatcacagatatatatataggacaatgggaggaaaaagctgaagtgat

SEQ ID NO: 2412 - DNA, 2775 bp, Saccharomyces cerevisiae
catagagaaaggcagaaagcttgtaaagaagtggaaataaagattgaagatgaactcgttagcttcaaacacaccgctaaatggtactccagtaagcgaggcacccgccacaagctccgagcctgtgaacatgttcgagacaatggtggctaaccctattaaagtgtctcgattacagtctaatggagttctgacgggacctgcagccaatactaagtccatccactattcgctggccaattttaatgtgttccagtcgctacccaaggaaacggccagaggtgtagacgatttgacgaggatggagatggcgttactgagtgggataccggaggagattaagtggtctttaaaaaaatatcttacgtatagtaacaaggcgccatatatgatcagcttacggacattgccggacctgttgccacttttcaagactttcatattgcctttggagcgcatcgtggaaggtcttaacaaatcgtctatatgtgattcaaaggcgatggattctctacaaatgggtctaaatgccttgctgatcctaaggaatctggctcaagatactgattcggtgcagatactagtcaaggatcgagaaatcaaatctttcattcttttcattttgaagaagtttcagtgcgtcgctacaggcgataacaagtggcaattgtacgaaggaaatgcaactttttttaacgagttgacccattatactctggacttgatggaggccatttcgtcctatattgctcctgcaatgaaggatgatcattatttccaaacgctggtgtccatcttgaactacactaaggacagatacatggttatttctatattgaggtctctttcaagattactggttaggtccaaagctaacgaggaaagtgcagcggacaatttggaccataagactctttcgttgatcgtttcctttttactgttagaatgcgatagtgagctgattattgcttcgttggatttcctctatcaatacattttgcccggttctcaaagaatcactgagttattcaagagtaaggagtgctctttgatactggaagccacgctgcctaatttattatcatataatatcgccacaccagattaccatcttttgcaaaagcacaaaattaggttgattaaaaggttgaagcctcccgctccaaaggagcctcccaatttatctgaggatctgtttcaacaacttttcaaacttaacgagcccttgaggtcaaccgcttggttgagatgttgctttgagcctgtacaagaagcagaatttacacaaatatcgctttggagatcctacgaatccaaatttggtcagcctgttcgcgaatccggacgcaaattgttacctgccgtggaattcatcaagaatgtctcgaatgctttcaataacgccgctgctatcgtaatcactgacccggtaaccggcaagaaaaggtttgttatcaagggcattcaaccaagatttaaagctttgggtattgcagacggggaaagagaatcccaggtacccatttcggcactaaaatccaaatttttgaatgactctaaggaaattacacctgcaagacaaaacagcataccagaggtcaaattccctcaagaactctcagatgtttctaaagtggcctgtacgtttttgtgccttttatccaacgacacggatgatggtgctggttccgcattttgtcaacgcatcaggccactggttctacataaattggctgatattccacctttaacattagcattgtctgaatacatggaaaacacgtcggggttatgaatgagaaaaaaaatcggttgggcttaactttaaagaaaaaagttgagattagatttattgtgttataaatatagatatacaattctttataaaaaaaatatatatatatatcattgttattaaataaagagttttcctagtatatagattaaaaaactactctattaaatgagagctaaaaaaagcaggctgccaaaaaaataaagcatttatgaagggggttcagcaagatgcaatcgatgggggaagattattttttaacatcgtaagatcttctaaatttgtcatcgatgttggtcaagtagtaaacaccactttgcaaatgctcaatggaaccttgaggtttgaagttcttcttcaaatgggcattttctctcaattcgatggcagcttcgtaatcctttggagtttcggtgattctcttggctaatttgttagtaatatctaattccttgataatatgttggacgtcaccaacaattttgcaagaatatagagatgcagctaaaccggaaccgtaagaaaataaaccaacacgcttgccttgtaagtcgtcagatccaacatagtttaatagagatgcaaaggcggcataaacagatgcggtgtacatgttacctgtgtttgttggaacaatcaaagattgggcaactctctctttgtggaatggcttagcaacattaacaaaagttttttcaatgttcttatcggttaaagattcgtcataatcgcgagtagctaattcggcgtcaacttctgggaacaattgaggattggctctgaaatcgttatatagtaatctaccgtatgattttgtgaccaatttacaggttggaacatggaaaacgttgtagtcgaaatatttcaaaacgttcaaagcatccgaaccagcgggatcgctaaccaaccctttagaaatagccttcttggaataactcttgtaaacttgatcaagagccttgacgtaacaagttaatgaa

SEQ ID NO: 2413 - DNA, 1321 bp, Saccharomyces cerevisiae
taggtctaagactagaaaagatcgcataacgatatggtattggctaaacaatgggttttgaaaaacctaccaactcctggtgaaccatttaactttcattttcacgatcctgcatgtactttcgagctcattgaaaaggaactctcttcagaacaattaaaggacggtgaattactactggaaacaacttatttatctaatgatcctgcccaaaaattttggatatcatcaatggacaaaaattacgccaaaggtgtccagcctggtgaaattattcctgcaagaggaattggtaaagtcttggcctctagaaataaagcattctctcctggcgattatgtctctgcagtgaccggctggactacacatgccataatttcgcaagaaaatgttcaagggctgagaaagcttgacaaaaacaaagttggtaaattatggtggtatctctctgtcttaggtggtacgtctttaacagcttattttattttctttacttatgctcaattgcaagaaagagaagaggactatggaaaagtttacctaatctccggtgcagctggtgccgtcggtaccgtttgcattcagctggccctaaacgtttttaaggcttcaaaggttattgctatcgcaggtggaccagaaaaggttgcttttgttgaatcctttggtgataatgtagtcggtgttgattataaagatccaagtttcaagcagaaacttatcgaggccgctggaggtgagaataccgtggattactttatcgataatgttggcagtaatgtgttggaagcaggtgttctacttctaaagcaaagggctatgttgatagcctgtggtgctataagtgcctataatgatccatctaaatttgtctttaaggggtatagctttattctgactaaacgattggtcgttaaaggagtactagtgacagataatattgatgattttccaaaggcattagataaattgggttctctggttaagcatggtaagattgacctcttgaaatccgctacccttgaagatggtaccggtgataagttcaagaatgttccattgatatggaagggtctatttagcggtgttaataaaggtaaacttattaccaaggttaacaatgaggagtgattttacacaaaaagtttaagatatgactatattatttttattattgtatctacttcgttttggctcttataattttttagtggcctaaattttcaaaggaaaaatttattgaatattttgaatgatatttaaactctatattttgaaatctatacattgaatacatataagataaactgtgttgctctta

SEQ ID NO: 2414 - DNA, 773 bp, Saccharomyces cerevisiae
gattaatatttcgaacaaagaacagaacaagaaaagcaacaacagcaacaaaattctaaaatatggcacgttcaagaggatcatcaagacctatatcgagatcgagacctactcagacaaggtccgcttctaccatggcggctccagttcatccacaacaacaacaacaaccaaatgcctattcacaccctcctgctgcaggtgcccaaacgagacagccaggtatgtttgcgcagatggcctccactgctgcaggtgttgccgttggtagcaccattggacacaccctaggtgcaggtattaccggtatgttttccggatccgggtctgattccgctcctgttgagcaacaacagcaaaatatggccaacacctccggccaaacccaaacggaccagcagttgggaagaacttgtgaaatagacgcgagaaactttacacgttgtttggatgaaaacaacggcaacttccagatatgtgattattacttgcagcaactaaaagcctgccaggaagctgcacgtcaatactaagtttaaaagctcaaaaatttagaaaatattcactaaaatcatacatttcggtaatgttcttgttttaaccatgtcatttgacttatttttttttgatggtttttcacagaatcgcatactccacgtgagaacaagaaaaaatgaaaggaataaggactaaatgtcttatatatatggatatttatttgttttattttgtatgtaaataacttttataaatcaaatcatccaatttattga

SEQ ID NO: 2415 - DNA, 1301 bp, Saccharomyces cerevisiae
cacctgcacgtaatctaaagtgcttttatcgattggtagtgcacatattgtctttcggcatcatatcacataatggcaaattcgccgaaaaagccatctgatggcactggagtatcagcgtcagacacgcctaaatatcaacataccgtcccagaaacgaaaccagcatttaatttgtcaccaggtaaagctagtgagctatcacatagccttccgtcgcctagccagataaaatcaaccgcacatgtatcttcaactcacaatgatgcggcaggtaatacggatgattctgttcttcctaaaaatgtatcacccacaactaatttgagagttgaaagtaatggagatacaaacaatatgttctctagccctgctggactagctctaccaaaaaaggatgataaaaaaaaaaacaagggtacgagtaaagcagattctaaagatggcaaagcatccaactcctcaggacagaatgcacaacaacaatcagacccaaataaaatgcaagatgtccttttttccgcaggtatcgatgttagggaggaggaggctcttctaaattcatctattaatgcctcaaaatcccaagttcaaacaaataacgttaagatccccaaccatttaccattccttcacccggaacaagtttccaattatatgaggaaagtcggaaaagagcaaaacttcaacctgacccctacaaagaatcctgaaattttggacatgatgtcaagtgcctgcgaaaactatatgagagatatcctaacaaatgccattgtcatctcccgacatagaagaaaagcagtcaagataaattctggtagaagaagtgaagtttctgcggctttaagagccattgcactaattcaaaaaaaagaagaagaaaggcgtgtgaaaaaaagaattgcgttgggactcgagaaggaagattatgaaaataagattgattccgaagagacgttacacagagcatcgaacgttacggctggccttagagcaggtagtaaaaaacagtatggttggctaacttcatcagtaaataagccgacgtccttgggagcaaaatcttcaggcaaagtcgcctccgacatcacggctagaggagaaagtgggctaaagtttagagaagctagagaggagcctggtatagtaatgagggatttactctttgctctcgaaaataggcgcaacagcgttcagactattatttcaaagggttatgccaagatcagagattaattgctcatctcttatactgtctataatatttaaaggtatagtgtttcaaataaactaggata

SEQ ID NO: 2416 - DNA, 1637 bp, Saccharomyces cerevisiae
tggtcaagtattcatcttttcctccatttatttgcatacttcttccatggagaatagtgaaaagtataggccatagtcgtaatatcaaaaagcaaagccttatcactatttataaacatcaacaatcctgaaagccaaaaacgatacgacatttgatattttgatttggtttcagcgccctattttttttataaaaactatacgcatactgttgcattcctttctttataaaattcaataaaaaattaatactttccacagataaagctagagaatgtcaacaacaggtccgttagatgctactttaataagggacgttgcggttgctactgccaccaaagcatcatacgatatgagcgatactctatattcatatctacccaaggtcgaccaattttatattcctgaatggcttacaatgcaattcattgccaacaatttgatcagctttacccccctattttcatatggtaccacgatcattagcattgagaaatgcaagactgctttagggttttcaatagatatttgtgccacaatgttgatcgctagtatcctaagaatatcttactatctcattacaccgtatgaaatcactttgttgaggcagtcattagtgatgatttttattcaactgatcttgctgagaacaagcttaaaatatagacctgatgagtacaaataccaaaatctcaccgatgtagagtcattgtcacatttgattcacgacatatggttcgagttttttagctgcattaatagaccgaaatttttaagtgaagattggaagaatctgatcaaatctctttcgttcacaaatttactgaaattttcattcaaaatttttttggcatttttttataaaattttgaaattctttgacccaaatttcaaaagaattggagcgttttggcagtgggatgacgacaaaaatttctggaggtttttagctctttttgcaactgtacaaatattggtcacatttttcatctctaatattttaaattgggactcactagctcaaggactgggctctatcatagggtcgttgggtttattggtggagtcgcttttgccgttaccacaaatcgccattctttataaattgaagtctgttcaaggtttcaaattgatccttttggtaagctggctttgtggtgatacactgaaaatcacttacctgatatttggtgcgaaaaatatttctgctttgtttgttatttttgcattatttcaaatgtcattagacttttacatcggtggtcaatacatttactacagatactattatccaaagttaaggcatcaacatcaccctaatgacagtaattcgccatcagatgaagatgaaagcgaaatgtacgaattagatctttttaataccttacaaaaggatgtcgaaaaggccttgaaacaggatagtaatgatacgtcagattcacctcaagatgaccaagtgggtaaatctcaggcacaggcggtaacgctatagaaattttcaggtttgcaaataaaaaaagttgatagagaggtttttttatattttagatatatgcattcataattcgatatatacatgcatgcatatctcgagtacaatattaccattgttgtaattacttgttaaatatcgcctc

SEQ ID NO: 2417 - DNA, 1786 bp, Saccharomyces cerevisiae
acaacaaattaaattacaaaaagacttataaagcaacataatgtctgaattcgctactagccgcgttgaaagtggctctcaacaaacttctatccactctactccgatagtgcagaaattagagacggatgaatctcctattcaaaccaaatctgaatacactaacgctgaactcccagcaaagccaatcgccgcatattggactgttatctgtttatgtctaatgattgcatttggtgggtttgtctttggttgggatactggtaccatctctggttttgttaatcaaaccgatttcaaaagaagatttggtcaaatgaaatctgatggtacctattatctttcggacgtccggactggtttgatcgttggtatcttcaatattggttgtgcctttggtgggttaaccttaggacgtctgggtgatatgtatggacgtagaattggtttgatgtgcgtcgttctggtatacatcgttggtattgtgattcaaattgcttctagtgacaaatggtaccaatatttcattggtagaattatctctggtatgggtgtcggtggtattgctgtcctatctccaactttgatttccgaaacagcaccaaaacacattagaggtacctgtgtttctttctatcagttaatgatcactctaggtattttcttaggttactgtaccaactatggtactaaagactactccaattcagttcaatggagagtgcctttgggtttgaactttgccttcgctattttcatgatcgctggtatgctaatggttccagaatctccaagattcttagtcgaaaaaggcagatacgaagacgctaaacgttctttggcaaaatctaacaaagtcaccattgaagatccaagtattgttgctgaaatggatacaattatggccaacgttgaaactgaaagattagccggtaacgcttcttggggtgagttattctccaacaaaggtgctattttacctcgtgtgattatgggtattatgattcaatccttacaacaattaactggtaacaattacttcttctattatggtactactattttcaacgccgtcggtatgaaagattctttccaaacttccatcgttttaggtatagtcaacttcgcatccactttcgtggccttatacactgttgataaatttggtcgtcgtaagtgtctattgggtggttctgcttccatggccatttgttttgttatcttctctactgtcggtgtcacaagcttatatccaaatggtaaagatcaaccatcttccaaggctgccggtaacgtcatgattgtctttacctgtttattcattttcttcttcgctattagttgggccccaattgcctacgttattgttgccgaatcctatcctttgcgtgtcaaaaatcgtgctatggctattgctgttggtgccaactggatttggggtttcttgattggtttcttcactcccttcattacaagtgcaattggattttcatacgggtatgtcttcatgggctgtttggtattttcattcttctacgtgtttttctttgtctgtgaaaccaagggcttaacattagaggaagttaatgaaatgtatgttgaaggtgtcaaaccatggaaatctggtagctggatctcaaaagaaaaaagagtttccgaggaataagagattatacttaaactagcactgatttttttaaggctaatggctactaatactttaatagatgatcttcatacttttttatttaacgatttttaatgatgtttttatttgtaccactca

SEQ ID NO: 2418 - DNA, 4096 bp, Saccharomyces cerevisiae
tgcagtgaagattggatataaggttcactaaacacagagtagtaattgagctgtaatttgtttacagaacgaatcaaatcagcgtagtgttacagtttatctgagactgcatatctttaatctctatgagcgagaaaaaagaagaagttaaaaacgccaccgttaaggtgactgtcaaacttccaaaagaagataaccattcgcataatacgaaacatctcaaaaagacccaaagttcaaaaaataatgatatatcttttgaaatcggcaaggaatccaaaattcaaactgttctagatgtgttggctatgattccaagttccaagtacctgacaaacgttgggctgaaaacaattgaaggtgactcccagctatctgatgaaatgtctataaaggaaattgttggtgagaaaagcgagttaaaacttcaattgatactgaagccatatagcgcaagagaggctttgaaacatgtgattactgttcgcgatttcatcggatttgcccaagaaacctcagatggattatctgaatttgctatttctactggttcaagcttttcctcgttaccgttgggtcctatcaaggaacgctcaaaacaagaagaaaaagacgagaagagcgatccagaagaaaagaaaaatactttcaaagatgtgactgacgaggaaaaactaaaatttaacgagatggttcacgaagtgttttctagctttaagaattcttcaattaacaaacttctcacctctgaatccaacatcatcacgccgtgcgtcaggtctttgagtttcgcaccttacaatcctgtacctccattttatagaagtaaaggtcatctattttacctacaaattgtcactttggaaggtgagagtttctatatcactgcaattccatctggattctatgtcaataaatcaaactcaactaagttcgatccttctccaaaagaaaacactgacgagaacgcgcactcatccctgatctattacagtctatttgacttgattgcttctcgctctaaaaaattcatttctcatgtccaagcattcgagaaaaaactatctgctttagattctacaagctatgtaagaccaagcaatactttcttgcataaaccatggtttgtttcttcattgccaccaaataacccagattatctgaggttacaaactgccgccttggataccacgccagaaagaaactttaatgatgaatttcaagccattaaagatttgactacgtcaacattacaagatcgtattgaaatggaaaggttgttttctaaagttgtacatgaattttctgttactgcagcatcaggcgctatgtcaattttttacagtgatttcgttgcaatgaacccagaatctccaactcgggatcaaattttcttaaaagacaatatcttttattcctatgtttccgacgttagtggcaattatgaagggaaaggtggggatgaagctgcaatcgctgcttccaaccaagacttgaagacaatcaatattttgaatcgcttgcatatgcacgaagttcgttatcttttaacaactgtagtcgaatttgcaggcagaagaattttggctcaaactccagtacctggactcttagctaccatgggtaacaaaattgtaaaagatgctaataccggcgaagaggttaccgaagattttgtcaatgatattaatgtaaagtacggccttgatgaaggtttgggaaagattgtttatgatgctgactttgattctgttttagaaaaaaagtttgtcaaggcattccatttgaaaaagcacaaagtcaacggtactgaattagcattttcatcgcaatccaagggaatagttggattcgataagaggcgctatattttggatttagccaacacgtatcccttggacatcaactttgctagacaaaactttgacaacatcgaagagactggaaaccgttacccacacaggcaaactttgttacgtccggagttagtagaaaagtggtggaataataaagttgagaaggaaggtgttgaatttgaaaaggcctatgaagaaaatttgtttagttataaccctgatgcttaccaggtcgaaggtattgaggacgctaatgttgacgaaatgtcgaactacttacaaaaagaagttattcccagcgttattcaagattatttatctggaaatttgagcactccttataatggtgaacatttagccgatactttacataagaatggtatcaacatgcgttacttgggtaaaattatcgagctttctcaaaaggaattggactcccaaattgtccactacgaacaaaatttgaaagctgttgaacaagacaacaaagaatatgaggattgggaaaaatcttatctgcaaaaaattgagaacatgattaaagagagacaagccaagattaataagctggtacaagaaggcaaagaggttccaaaagaactaactgaagatttgaaattaaacgatgaagaaatcaaaaagcccaccgatggaaaacctgtggtcgttgcctatgatgagctagtgccattaattaaaatttccgaattagaaattgtttcgcgttctttgaaacatgttttaaaagatttgagtaaagatgttccggtcttcttggttccatcactggtagcatacgttttcaatatgttagttggtatcaactacaatgctgatccgaagccagaaccagtcgacgaattttatccagtcaataagtgctcatttgctaaattaacacgctccgaattgctggaagctgtctctaaacaagccttcttgcgtttccgtcatcaattaccatccaattggatcgaagcttacatggaaaatcctttcaccctcattagaagtgtttcttacaaatttggtattcaattgctcaataaagaatacttctttactagagaacaattggaaagttataagcaaagtcttgacaagaaaattaggaacaagtttgtcgaaccaccaactaccttcagtttaagcgatttgaccattattccacgtgttaagttctcagaatatacttcttcagttagtgaggaattttgggctcaaggtgcttctatgatcaacgaagacaaacaaagtgctttgactttactcgctcaatcaattacagtcttagaagatgttaacaatattttacatcccgccgttgctgaaaagtacttgtcattatctgccatttataataagttagcattataccctgaagctatcgcgttctgtcgtaaagcatgtactatttatgaaagagttagcggtattgattcttttgaaatgatgagggctttaactaatttagcaattctagaattctctaatgaaagtccttataacgctactgtggtttataataggctcgcagaaatcctaaaagtttatgagttaccaaaaatccatcacccagcccccacaagcattttcaaccatttggaacaattagccctaggtgttcaagataccaaattggctattgaagtcttgggacaactaagctcctatgttgtggaattagaaggcaaagattcattagcatatggctataccgagtcacgtttaggtaatttgtttgcagcattgaaggatttccaccgtgcattagagcacatcactgtaacccaagggattttcaccaagcaattgggtatgaatcacacgcactcagcccaatcaagacagtgggttaatggtttaagctcattaataatggatttaaaacaaaagaagcaacttgcacaagatcaaatgtcgacaacgggatcaaattcagctggccataaaaaaaccaatcaccgtcaaaagaaggatgacgttaaacctgaattggctaacaaaagtgtggatgagttgttaacatttatagaaggcgattcttccaactctaagagcaaaaacaaaaccaacaataaaaagaagcatggtaagaaatagagagctaacttaacaatctcgtttatttattatttttctttatatctatagcccatacttgtatatactacgtgtaagtactagatataaaacgaaaaaaaaatacttacaattatttttttttctttactgctcta

SEQ ID NO: 2419 - DNA, 618 bp, Saccharomyces cerevisiae
aatttggaagggcatagcatgtcgaaaaccgctcagaaacgtctcctcaaggagcttcaacagttaattaaagattctccacctggtatagtggctggtcccaaatcggagaataacatattcatttgggactgcctaattcaagggcctccagatacgccatacgctgatggtgtttttaatgctaagctagagtttcctaaagactatccgttatctccacctaaacttactttcacacccagcatactacatccaaatatttatccaaatggggaagtgtgcatatccattctacactcccctggtgatgatcctaacatgtacgaattagcggaagaaagatggtcgccagtgcaaagtgtagaaaaaattctattaagtgttatgagcatgttgagtgagcccaatatcgaaagtggtgccaacattgatgcttgcatcttgtggagagataatagacctgaatttgagagacaggtaaagttatccattttgaaatcattaggattctgaaagcaggtagcaggttaatgatcatttggtcttccttttaactgttctctatatacataaataagcatatctaccatctaaaagaaagcaaatgtcacataa

SEQ ID NO: 2420 - DNA, 1173 bp, Saccharomyces cerevisiae
atgggcatagttttgaaaagagcaatagcagcaggtatgaaaccttttccaaacagtacgtggcattggagccgaaccataagacctttctcacagcatttgtctagcacatgctttctgcagcaatcctcgagatttacttcaaaacgatacctacacctttcaacattaacacaacaagaaaagcgcttcctacccgaatctgaacttgctaaatataaggaatactaccagggtttgaagagcactgtaaatgaaatacctgaatcagtggcctctaagtcaccttcgttaagaacgcttcataagagattacaattacctaatgagttgacctattcaacactttccagatgcttaacgtgtccctctgcaaaactacccgacaagataaataatcctacaaaaggtgcagctttcgttaatactgtacctactaataaatacttggacaaccacggtttaaacatcatgggaaagaacttgctctcttaccacgttacaaaatccattatacagaaatatccgagactacccactgtggttttgaatgctgcggttaacgcatatatatcagaggcggtactggcgcacattgctaaatactggggtattgaagtagaaactacgtctgttttatcacgctatttgaaaatggaaccattcgaattcactttgggaagactcaaattctttaataattcattgaactctaaggacggtattgagctaatcaccggaaagaacttttcagaaacaagcgctcttgcaatgagcgtgaggagtataatagctgccatctgggcagtaacggagcaaaaagattctcaagctgtttacagatttattgatgatcatataatgagcaggaaattggatatcacgaaaatgttccagtttgaacaacctacaagagaattggctatgctatgtcgtagagaggggctggagaaacctgtatcgaaactggtcgctgagtctggtagactatcgaaatcacctgtctttattgtgcatgtattttcaggcgaagagacattaggtgaaggttatggttcctcattaaaggaggcaaaagcaagagccgctactgatgctttgatgaaatggtattgctacgagcctcttgctcaacaggaaccagttattgatcctggcactgttgttgtttag

SEQ ID NO: 2421 - DNA, 1527 bp, Saccharomyces cerevisiae
ggttcattgtggtccttgtgtaaacggaaaaaaaggatattacggtagtgggtagtacataacaagagatgactatccctggaagatttatgacaattgataagggcacttttggtgaatacactgctagcacccgttggcccattatcattcagaatgctatagacgatttaagtaagcatcaagaaacggagaagagtaacggcactaagttcgaacaaggtgaagttatcaaaaaggagctcaaggaattccgtcaggagataattgatcgtgtacctttgagaccctttactgaagaagagatcaaaattgccaacgtcccgctttcgttcaatgaatatctaaagaaacaccctgaagtcaattggggggctgtagagtggctgttctcggaggtttacttgtatagaagagtaaatgttcttttccaacgccaatgcgaatgggctaaatttgacatattcaacagacttaaacagtcaacttttgagtcctcgttttatggtgtcgtggaattggcgttaaggtatgaaaatctgttaccacagctgagagaaatgaagcaaaatccaggaaatgagattgacgatatattgaaagttctttttaaagagtttattgagatttctttgtggggcaatgccactgatttatctttattgaccaacgctacgttagaagacattaaatcaatccaaggggcgaaagcaagagctgcatccgagtccaagattgttgttaatgacacggagaaagcatgggaggtattaaccaaagccagggccgatgccaatagcagagaaattcgtgttgattttgtattagacaattctggctttgaattgtatgctgacttgatgttggcagcttttctgttacaaagtggtttggctaccaaatgtattttccacgctaaagacattccatacatggttagcgatgttatgttaaaagattttgatatattagttcatgacctgagagatcgtgagttcttcccaagtggtgaaccctcgacaaaggaatccagagctcttgatttatttgctggtgaaatggaaaagttcgtctctagcggtaagatagaattccgcgaagattctttctggaccacggaattagattattggaatttggacgcaaacgaaaccaaataccatggatccattttgcacaaagatttgcaaaaatccaatttggttatttttaagggtgatctaaactatagaaaattaactggcgacagaaaatggccccgcaccactaaatgggaaacggctatcggacctcttgctacgaatggtattacatcattgagcttgagaacctgtaaagccgatgtacaagttgctttacctgaaggtctagacgcgaaattaagtcaagaatgggaaaaggaaaatcctggccgtggttcttggtggtgttgtagcggtaaatgggcagtcatttgtttctgctctggtatacataaataagaatatgataagttctctatataactttactttatgactttcccta

SEQ ID NO: 2422 - DNA, 1589 bp, Saccharomyces cerevisiae
gtcttgaacaactactatatgcattgaatatggctccatttaggcaggacagtattttgataatataccccagatctcaaactactctcgttcaatttggtttgaatgaagaaacattcactgtacctgagctggaaataccaacacagatttatcggaccacgagacaagatggttcctacacatatcattcaacgaacaaggataataaagccgaattaatcaaaccaatccaaaatggtgaaataatagacataagcgcctttacacaatttcttagactaatatttgtatctattttgtctgatagagctaataaaaatcaagatgcttttgaagctgaattatctaatattcctcttctactgattacgcaccactcttggtcgcaatcggatctagagattattactcaatatgtcttcgaaagtcttgagataaacaatctaatccaattgccggcttccttagcggccacttattctatgatttcgttgcagaattgttgtattattgatgttggaacacatcatacagatattattcctattgttgactatgcacaattagaccatcttgtctcttcaataccaatgggcggacagtctattaatgattctctaaaaaaactactacctcaatgggacgatgatcagatagaatcattgaaaaaatcaccaatttttgaggtgctcagtgacgacgccaaaaaactatcaagtttcgattttggaaacgaaaatgaggacgaggatgaaggaactttaaacgttgccgagattattacaagtggtcgtgatacacgtgaagttttagaggaaagagaacgtggtcaaaaagtcaaaaatgttaaaaatagcgacttggaattcaatactttttgggatgaaaaaggtaacgaaattaaagttggtaagcaaagattccaaggatgtaataacctgattaagaatatttctaatcgtgtaggattgacgttagataacatagatgatattaacaaagctaaagccgtttgggaaaatattatcatcgtcggtggcactacttcaatttcaggttttaaagaagctttactgggtcaactactgaaagaccatttaattatagagccagaggaagagaagtcaaaaagagaagaggaagcgaaatccgtattaccagctgcaacaaaaaagaaaagcaagtttatgacaaatagcaccgcatttgttccaactatagaatacgtacagtgtcctacagtaatcaaactggctaaatatccagattactttcctgagtggaagaaaagtggatattcagagattatattcttgggtgcccaaattgtttctaagcaaattttcactcatcctaaagatacattttatatcacaagagaaaagtataatatgaaaggaccggctgctctttgggacgtgcaattttaagaatacgtgatagatgcttcgtgtatccaaaatccgtgtgaatatgtgctgtttagttttttccatccaatgaggatgggaaatatatacataaacgttatgtaatatatagaattcatgcaaaattaacaagggaaatatcaccttggttgtgta

SEQ ID NO: 2423 - DNA, 657 bp, Saccharomyces cerevisiae
gttgcattgtactgtacagtaatgtttcgagccggatcatcaaaaagattcttacgaaacacactaatagcaatttcatgggttccggtacttctaacaatcaataataatgtggtccatattgcgcaagttaaaggtacctctatgcagcctacgctgaacccgcaaacggaaacgctggcaacagattgggtgctgctttggaagtttggagtcaagaacccaagtaatttatctagagatgacattatccttttcaaagctcctacaaaccctcggaaagtttactgcaaaagggttaaaggtttaccgtttgataccattgacacgaagtttccataccctaaacctcaagtgaacctgcccaggggacacatatgggtcgaaggggacaattattttcattcgattgatagcaatacttttggccccatttccagtgggttggtcatagggaaagctataacaattgtttggccaccctccaggtggggaacggatctcaaactgagtaccggtagagactgcattagcaaaagagccattttagaatgaaaatcagcttatttttatgaatttagaagtgaccccggtattcaaatgcaaattttttatattatgtgattaatctaatgcaataaatatagatgattgtga

SEQ ID NO: 2424 - DNA, 665 bp, Saccharomyces cerevisiae
ctagcaagtagctatgcgattttcctgcgccattttttttcccacattagttacatacactctctaaagaatattgctaaatatgacgtcgaatagcgacggttcaagtaccagtccagttgagaaaccaattaccggcgatgttgaaactaatgaacctaccaaaccaatacggcggctttcaacgccatcgccagaacaagatcaagaaggcgatttcgacgaagaagacgatgatgacaaattcagcgtgagcacatcaactcccaccccaaccataacgaaaactaaggacagcagcgacacaagtacggttacgaggcggaagcagccgatcaggtacatcgagaataagacccggagacatgtcaccttctcgaagaggcggcacgggatcatgaaaaaagcatatgagctctccgtcctaaccggcgccaatattctgcttctaattctggcaaactctggcctggtctacactttcacaacgcctaagctcgagccggtggtacgggaagacgagggtaagagcctcatcagggcatgcatcaatgcttcagacactcctgacgctaccgacacgtcgccggcacaggaacaatctccggcaaactgaacatgcgagagtaagagatgccccacgaaggcataggcagatccatata

SEQ ID NO: 2425 - DNA, 2806 bp, Saccharomyces cerevisiae
cgcaacagacgcattcttattctctaaaattcctcgagttatatgaataattatgaatcaagaagaggctatattccggtcagcagacatgacgtacgtccaactgtacataccgttggaagtcataagagaggtaactttcttattagggaaaatgagtgtctttatggtgatggatctcaataaagatttaactgcctttcaaagaggttatgttaaccagttgaggcgtttcgatgaagtggaaaggatggtaggcttcttgaatgaggtagttgaaaagcacgccgcagagacctggaagtatattttacatatcgatgatgaaggaaacgacattgcccaacccgatatggcggatctcatcaataccatggaaccactatcgttggaaaatgttaatgacatggtgaaggaaattactgattgcgaatcccgtgcaaggcaattagatgaatctttagatagccttagaagtaaactgaacgatcttttagagcaaaggcaggtaatattcgaatgctcaaaatttattgaagtcaatcctgggattgctggaagagctacaaaccccgagattgaacaagaagaaagggatgttgacgagtttagaatgacccctgatgatatcagtgaaacattaagcgatgctttttcttttgacgacgaaacaccacaggaccggggcgctctagggaatgacctcactagaaaccaatcagtcgaagatctaagctttttagagcagggataccagcatagatacatgataacaggctctatcagaagaacaaaagtagatatattgaacagaatcctgtggaggttattgcgtggtaatttgatctttcagaattttccaatagaggagccattgttggaaggtaaagaaaaggttgaaaaggactgctttattatttttactcatggtgaaacattgctcaagaaggttaagcgtgtcatagattccttaaatggtaaaatagtctccctgaatactcgttctagtgaattagttgacaccttaaaccgtcaaatagacgacttgcaaagaatcctggatactaccgaacaaactttacacacagaactgctcgttatacatgaccagctgccagtatggtccgccatgacgaaaagggaaaaatatgtttataccacattgaacaagttccaacaagaatcacagggtctaatagccgaaggttgggtgccttccacagaattgatccatttacaagactcattgaaggattacattgaaacgttgggttctgaatacagtaccgtctttaatgtgatcctaaccaataaattaccacctacataccatagaaccaacaagttcactcaggccttccaatcgattgtggatgcatacggtatcgcaacatataaagaaatcaatgctggtttagccacggttgtcaccttcccatttatgtttgccattatgtttggtgacatgggccatggtttcattttatttttgatggcactattcttggtgctaaatgaacgtaagtttggtgctatgcacagggacgaaatttttgacatggcatttacaggtagatatgttttattgttgatgggtgcattttctgtatatactgggctgttgtacaatgatatcttttccaaatctatgacaatattcaaatcaggctggcaatggccttccactttcagaaagggcgaatcgattgaggcgaagaaaactggggtttatccgtttggattggattttgcttggcatggtactgataacggactactattttccaactcttataagatgaagctgtccattctaatgggatacgcacatatgacttattccttcatgttttcttatatcaattacagagctaaaaactctaaagtggacataattggtaactttatccccggtttagtgtttatgcaatcaatatttggttatttgtcgtgggctatcgtgtacaagtggtcgaaggattggattaaagatgataagcctgctccagggttactgaatatgctaataaacatgtttttagcaccgggtactattgatgatcaattatattccggacaagccaagttgcaagttgtactactgcttgcggcactagtttgtgtcccgtggttattgctgtataaacctttaacactgagaaggttaaataagaacggtggtggtggcaggcctcacggataccaaagtgtgggcaatattgagcatgaggaacaaatagcacaacagagacattcagcggaaggtttccaagggatgatcatcagtgatgttgccagtgttgcagacagtatcaatgaaagcgttggtggaggtgaacaggggccatttaatttcggcgatgtcatgattcatcaggtaatccatactattgaattctgtttaaattgtatctctcatacagcatcatatctacgtctttgggcactatcgttggcgcatgcgcaattatctagtgttttatgggatatgacaatttcaaacgctttcagttctaaaaactcagggtcgcctttggctgtcatgaaggtggttttcttatttgctatgtggtttgttttaaccgtttgtatcctagttttcatggaaggtacttccgcaatgttgcatgcgctacgtttgcattgggtggaggcaatgtccaaattttttgaaggtgaaggatatgcgtacgagccattttcatttcgtgcaataatagaataataaccttaaattactgtaaattttctcatctacccactgcttttttcgttttatttttttttacacatacagacatataaa

SEQ ID NO: 2426 - DNA, 2101 bp, Saccharomyces cerevisiae
gaggaccccagtgtaaggaagagtagcaaaaaattagaactagatgactaacgctttgctctctatagccgttttgcttttctcgatgctctcgctagcacaagcggagacgcacacgtttaattggaccactggctgggactacaggaacgttgatgggctaaagagccgtcccgtgatcacctgtaatggccagttcccatggccagatataacggtcaacaaaggtgaccgtgtgcagatttacttgaccaacggaatgaacaacaccaatacttctatgcatttccacggtctcttccaaaacggaaccgcctctatggacggtgtgcccttcttgacgcaatgtccaattgcgccaggcagtactatgctttacaatttcacggtggactacaatgtaggcacctactggtaccattcacacacggacggtcaatatgaagacgggatgaaaggtcttttcatcatcaaggatgatagcttcccctacgattacgatgaggaactttctttatcgcttagtgagtggtaccacgacttggtcacggacttgacgaagtcgttcatgagtgtttataatccgacaggtgctgagcccatcccacagaacttgattgttaacaacacgatgaatctgacatgggaagtccagcccgatacgacgtatcttttgagaattgtcaacgtgggtgggttcgtttcgcagtacttttggatcgaggaccacgaaatgaccgtggtcgaaatcgacggtatcactaccgagaagaacgtaacggatatgctttacatcactgtcgctcagagatatacagtcctggttcacactaaaaacgacacggacaaaaatttcgccatcatgcagaaatttgatgacaccatgttggatgtcattccaagtgatttacagctgaatgcaacctcttatatggtctacaacaaaaccgctgcgctgcccacacaaaattacgtggattcaattgataacttcttggacgatttctacttgcaaccgtacgagaaagaagccatctatggcgagccagatcatgtgattaccgttgacgttgttatggataacttgaaaaacggtgtgaattacgccttcttcaataatatcacctatactgcaccaaaagttcctactttgatgaccgttttgtcttcaggtgatcaagcaaacaactccgaaatctacggttcaaacacgcacactttcatcctagagaaggatgaaatcgtggagattgtgctaaataaccaggacacaggtacccatcctttccatttacatggtcacgctttccaaaccatccagagagatcgtacatatgatgatgccctaggtgaagttcctcacagtttcgatccggacaaccaccctgccttcccagaatacccaatgagaagagatactttatacgttagaccacaatccaatttcgtcatcaggtttaaagccgataacccaggtgtttggttcttccattgtcatatcgaatggcatttgttgcaaggtttgggtcttgttctcgtggaggatccttttggtatccaagatgctcattctcaacaactcagtgaaaaccacttagaagtttgccagagttgctctgtggccactgaaggtaacgccgctgccaatacactggatttaactgatttaactggtgaaaatgttcagcatgccttcattcctaccggttttaccaaaaaaggtattattgccatgacattctcctgctttgccggtattcttggtattatcacaattgcaatttatggtatgatggatatggaagatgcgaccgaaaaggttattcgagacttgcacgtggaccctgaagtcttgctaaatgaggttgatgaaaatgaagagcgtcaggtaaacgaagatcgtcattccactgaaaagcatcaatttttaactaaagccaaacggttcttctaataaaggaagatcatgtattttgcggttaacctgttttttttttttcggtcaagggttccaaatgcatttgcatgtaaagtgaatgcccttgtcttacttaatattacatagacatatacttaataatctaccacgtttcaaattcaa

SEQ ID NO: 2427 - DNA, 716 bp, Saccharomyces cerevisiae
aaagaagccaatcaattacaacaacaaataaatgaacagttacagcctattaactagatctttccacgaatcttctaagccccttttcaatttggctagcaccttgttgaaggcttccaagagaacgcagcttagaaatgaattgataaaacagggtcctaaaaggcccacatctgcttatttcttatatttgcaagaccacagaagtcaattcgttaaggaaaatccaaccttacgtcctgctgaaatcagcaagattgccggtgaaaagtggcaaaatttagaggctgatataaaggaaaaatacatttctgaaagaaaaaagttgtattctgaataccaaaaggcgaagaaggagtttgacgaaaaacttcctccaaagaaaccagcaggacccttcattaagtatgccaatgaagttcgttcgcaagtttttgcacaacatcctgacaagtctcaattggatctaatgaaaattatcggagataaatggcaatccttggatcaaagcattaaggacaaatacatacaagagtacaaaaaagctatccaagaatataatgctcgctaccctctcaactagaccgcggtactctcacaatgttttttatgcctttattctttccgttcctatccaaacaaataaataaatttaacttaaccaagcaagtgtgtagtgtttttatatcctatgtaagtcttcaaacttttttttt

SEQ ID NO: 2428 - DNA, 1276 bp, Saccharomyces cerevisiae
atcaaaccaaaccttcatcgccctaaaacacaatggttacacaacaagaaaaggaatttttagaatcctaccctcaaaactgtcctccagatgccttgcctggtactccaggaaatttagacagcgctcaagagaaggcattggcagaactaagaaaacttttggaagacgctggtttcattgaacgtttagacgattcaactttactacgttttttgagagccagaaaatttgatgttcaattggctaaagaaatgtttgaaaactgcgaaaaatggaggaaggattatggtaccgacactatcttgcaagattttcattatgatgaaaaaccattgattgccaaattctacccacaatattatcataaaaccgataaagatggccgcccagtatattttgaagaattaggtgctgttaacttacatgaaatgaacaaggttacctctgaagagaggatgttgaaaaacttggtttgggaatacgaatctgtcgttcaatacagattacctgcctgttcaagagctgctggtcacctagtggaaacttcatgtacaattatggatttgaaaggtatctccatatctagtgcatacagtgttatgtcatatgttagggaagcctcctacataagtcaaaactattaccccgaacgtatgggtaaattttacatcatcaacgcgccattcggtttctctaccgcatttaggctatttaaacctttcttggatccagtcactgtttcaaagatttttatcttgggttcttcttaccagaaggaattattaaagcaaattccagctgaaaacttaccagtcaaatttggcggtaagtctgaagttgatgaatccaagggtgggttatacctatccgatatcggtccatggagggatccaaagtatattggaccggaaggtgaagctccggaagccttttcgatgaaatgatattatttttaaagacatttttttttcgagagagaaaagaggagttctaagtaacgatattttacaactgagataagtacaagtatgcttatttactctattctacttttttgaataggcatagttcacacttttatctccttagtttgtactactctttttttattttttttttttcttccactcagctattagattatttattattttattatctgtggtatcattttctacagccataccttgattttagtttattttgttggcagttatatacatttatcttatagaatacatatgcacgtattaaacaataaaaagaacataag

SEQ ID NO: 2429 - DNA, 1289 bp, Saccharomyces cerevisiae
atatatatattatcttctgttcacagttaaaactaggaatagtatagtcataagttaacaccatcatgttgagaacgtcaacattgttcaccaggcgtgtccaaccaagcctattttctagaaacattcttagattgcaatccacagctgcaatccctaagactcaaaaaggtgtcatcttttatgagaataaggggaagctgcattacaaagatatccctgtccccgagcctaagccaaatgaaattttaatcaacgttaaatattctggtgtatgtcacaccgatttacatgcttggcacggcgattggccattacctgttaaactaccattagtaggtggtcatgaaggtgctggtgtagttgtcaaactaggttccaatgtcaagggctggaaagtcggtgatttagcaggtatcaaatggctgaacggttcttgtatgacatgcgaattctgtgaatcaggtcatgaatcaaattgtccagatgctgatttatctggttacactcatgatggttctttccaacaatttgcgaccgctgatgctattcaagccgccaaaattcaacagggtaccgacttggccgaagtagccccaatattatgtgctggtgttactgtatataaagcactaaaagaggcagacttgaaagctggtgactgggttgccatctctggtgctgcaggtggcttgggttccttggccgttcaatatgcaactgcgatgggttacagagttctaggtattgatgcaggtgaggaaaaggaaaaacttttcaagaaattggggggtgaagtattcatcgactttactaaaacaaagaatatggtttctgacattcaagaagctaccaaaggtggccctcatggtgtcattaacgtttccgtttctgaagccgctatttctctatctacggaatatgttagaccatgtggtaccgtcgttttggttggtttgcccgctaacgcctacgttaaatcagaggtattctctcatgtggtgaagtccatcaatatcaagggttcttatgttggtaacagagctgatacgagagaagccttagacttctttagcagaggtttgatcaaatcaccaatcaaaattgttggattatctgaattaccaaaggtttatgacttgatggaaaagggcaagattttgggtagatacgtcgtcgatactagtaaataatagcgtgttacgcacccaaactttttatgaaagtctttgtttataatgatgaggtttataaatatatagtggagcaaagattaatcactaaatcaa

SEQ ID NO: 2430 - DNA, 1709 bp, Saccharomyces cerevisiae
taatagaagtcccttgaaacagtttttgctaagaacaggcctaaggatcataatatagaaataaaatgtcgactgctaggcctagaataatcacttcgaaggctccattattgcctcaacagactaccccggagcagcgttactggcgtcaatacacttccgcacaactggttaaagaacataatagcgttactcacatatcattcaatcctcaacatcctcatgattttgcagtaacttcctcaaccagagttcaaatattttcttcaagaactaggcaagtgatcaagaccttttcaagatttaaagatgttgtctattctgcatcctttaggagtgatggtaaattgctttgtgccggtgatgctaccggtttagtgtctgtatacgacagttataatcccaggactatccttttatctataaacgcttccacacatcccacacatgttacgaaattccatacgcaagataacaaaattctggctacggcgagtgacgatagagtgacaagactttgggatatatccaacgcatatgagccacaattagagctcaccggagctactgactatgttcgtaccttatcatttatcccagcagccccacatttggttgcaacaggctcatacgacggtttgatcagattatatgacacaagatctagcggatccacgccaatttattctctgaatcatgaccaacctgttgaaaatgttattgcagtatctccaacccaaattgtttcttgcggtggcaataatttcaaagtgtgggacttgaccagtaacaagaaattatacgaacgtggcaatttcaataaggctgtgacatgcttggactatgttgaaaattttgattctccaatgcaatcggcgttgatcgcttcttccttagatggtcatgtcaaagtctttgatcctttagacaatttccaagtcaaatttggctggaaattttcgggtcccgtactaagttgtgctgtctcccctagtaccgcacaagggaataggcatttagtagcaggtttatcatcaggactactagccattagaactaaaaagaaagagaaacgttcttccgataaagaaaacgcacccgccagttttaataagaatgcgaaaagtaataacttccagagaatgatgcgaggctcggaataccaaggtgatcaagagcatataatccacaatgataaggtaagatctcaacgtcgtatgcgtgcattcgaaaggaacataaatcagtttaaatggagcgaagcactcgacaatgcctttgtaccaggtatggccaaagagttgacacttactgttcttcaagaactacgcaaacgtggcaaagttcgtgtagcgctatatggtagagatgaatctacattagagccgctactgaattggtgcttaaaaggtattgaagatgtgagatcagcatctattgtagcggattgggtcgccgtggttttagaattatatgggaatacgttagaaagctctccagttcttcaagaattgatgatagatttgaaaactaaagttagacatgaaattcataagtctaaagaagctcaaagaattgaaggtatgcttcaacttttaacgagttaaggaaatattagcatatagattttaatttgtatctattttatagatattcaggcatacatatatatctctttctcattgtaatcgaaaaaaataatatcttct

SEQ ID NO: 2431 - DNA, 2458 bp, Saccharomyces cerevisiae
ccctaattaataattcagatctacgtcacaccgtaatttgtattgtttttttccttcattgtctaaaaccgaagaattcatcagccacagttactagttcatttgaagcgaaattacacacattttccctgttacaatagaaagtattttacaaaatctaaaccctttgagctaagaggagataaatacaacagaatcaattttcaaatgatcagacaatctacgctaaaaaacttcgctattaagcgttgctttcaacatatagcataccgcaacacacctgccatgagatcagtagctctcgcgcagcgcttttatagttcgtcttcccgttattacagtgcgtctccattaccagcctctaaaaggccagagcctgctccaagtttcaatgttgatccattagaacagcccgctgaaccttcaaaattggctaagaaactacgcgctgagcctgacatggatacctctttcgtcggtttaactggtggtcaaatatttaacgaaatgatgtccagacaaaacgttgatactgtatttggttatccaggtggtgctatcctacctgtttacgatgccattcataacagtgataaattcaacttcgttcttccaaaacacgaacaaggtgccggtcacatggcagaaggctacgccagagcttctggtaaaccaggtgttgtcttggttacttctgggccaggtgccaccaatgtcgttactccaatggcagatgcctttgcagacgggattccaatggttgtctttacagggcaagtcccaactagtgctatcggtactgatgctttccaagaggctgacgtcgttggtatttctagatcttgtacgaaatggaatgtcatggtcaagtccgtggaagaattgccattgcgtattaacgaggcttttgaaattgccacgagcggtagaccgggaccagtcttggtcgatttaccaaaggatgttacagcagctatcttaagaaatccaattccaacaaaaacaactcttccatcaaacgcactaaaccaattaaccagtcgcgcacaagatgaatttgtcatgcaaagtatcaataaagcagcagatttgatcaacttggcaaagaaacctgtcttatacgtcggtgctggtattttaaaccatgcagatggtccaagattactaaaagaattaagtgaccgtgctcaaatacctgtcaccactactttacaaggtttaggttcattcgaccaagaagatccaaaatcattggatatgcttggtatgcacggttgtgctactgccaacctggcagtgcaaaatgccgacttgataattgcagttggtgctagattcgacgaccgtgtcactggtaatatttctaaattcgctccagaagctcgtcgtgcagctgccgagggtagaggtggtattattcatttcgaggttagtccaaaaaacataaacaaggttgttcaaactcaaatagcagtggaaggtgatgctacgaccaatctgggcaaaatgatgtcaaagattttcccagttaaggagaggtctgaatggtttgctcaaataaataaatggaagaaggaatacccatacgcttatatggaggagactccaggatctaaaattaaaccacagacggttataaagaaactatccaaggttgccaacgacacaggaagacatgtcattgttacaacgggtgtggggcaacatcaaatgtgggctgctcaacactggacatggagaaatccacatactttcatcacatcaggtggtttaggtacgatgggttacggtctccctgccgccatcggtgctcaagttgcaaagccagaatctttggttattgacattgatggtgacgcatcctttaacatgactctaacggaattgagttctgccgttcaagctggtactccagtgaagattttgattttgaacaatgaagagcaaggtatggttactcaatggcaatccctgttctacgaacatcgttattcccacacacatcaattgaaccctgatttcataaaactagcggaggctatgggtttaaaaggtttaagagtcaagaagcaagaggaattggacgctaagttgaaagaattcgtttctaccaagggcccagttttgcttgaagtggaagttgataaaaaagttcctgttttgccaatggtggcaggtggtagcggtctagacgagttcataaattttgacccagaagttgaaagacaacagactgaattacgtcataagcgtacaggcggtaagcactgaatttcaaaaacatttatttcaaaagcattttcagtaaaaaatgcagactttattattatttaatcgtgcttcttatatatgacattctaccaaatcggtagtcatgtatatttttttcgtatatactttatatatttttttctaaaaaactaatgacggctaaaattaagtcatagatgaataataa

SEQ ID NO: 2432 - DNA, 3768 bp, Saccharomyces cerevisiae
atacgaatttaaccgctttatagaaatggctatcttaaaaagaggagctagaaaaaaggtacatcaggagccagctaaacgctctgcgaatatcaagaaagctacttttgattcctcgaagaagaaagaagttggtgtgtctgatctgacgcttctttctaaaatctccgacgaagccataaatgaaaacttgaagaagagatttttgaatgctacaatctacacttatataggtcatgtgttaattagtgtcaatccattccgagacctcggaatctatactgatgctgttatgaatgaatacaaaggtaagaatagattggaagttccaccccatgtatttgcaattgcagagtctatgtactacaacatgaaatcatataatgaaaatcagtgtgttattatttcaggtgaatcaggtgccggtaaaactgaagcagctaaaagaattatgcaatatattgcggctgcttctagcacacatacggagtcaattggaaagattaaagacatggttttagccactaatccattgttggaatcttttggctgtgcaaagactctaagaaataacaactcttctagacatgggaaatatctagaaataaaattcaataaccagtttgaaccatgtgctggtaatatcacaaactatttattggagaagcagagagttgtgagtcaaattaagaatgaaagaaatttccatatattctatcagttcacgaaaggtgcttccgatgcttataggcaaacatttggggtccaaaaaccggaacaatatgtgtacacagctgctgcgggttgcatatctgctgagacaattgatgatttgcaagattatcaagagacattaaaagctatgagagttattggtctcggtcaagaagaacaagaccaaattttcaggatgttagctgcaattctttggattggtaatgtttcctttatagaaaatgaggaggggaatgcgcaagttagggacacctcagtaaccgattttgttgcttacttgttacaaatagatagccaattgctgattaaatcacttgtggaaagaattatggaaaccaatcatggtatgaaaagagggtcagtgtatcatgttccattgaatattgtccaagcagatgcggttagagatgctttggcaaaggctatttacaataacttatttgactggattgtgagtagggttaacaaatctctgcaggcttttccaggcgctgaaaaatccattggtattcttgatatttacggctttgaaatttttgaacataactcttttgagcagatttgtatcaattatgttaatgaaaagttacaacaaatctttattcaattgacattgaaatctgagcaagaaacttacgagagagaaaaaatccaatggaccccaattaaatactttgataacaaggttgtgtgtgatttgattgaggcaagaagaccacctggtatatttgcagcaatgaatgattctgttgcaactgcacacgcggattcaaatgctgctgatcaggcttttgctcagcgtttgaacttgttcacaacaaatccacattttgacttgagatctaacaagtttgttattaagcattatgccggtgatgtcacatacgatattgacggtattacagataaaaataaggatcaattacaaaaggatctggtagaattaattggtaccactaccaatacatttttagccaccattttcccggatactgtagacagagaatcaaaaagaaggccacctacagcaggcgacaaaattataaagagtgcaaatgatttggttgaaactttatcaaaagcacaaccttcatatatcagaacaattaaaccaaacgaaaccaaatctcctaacgattatgacgatcggcaagttctacaccagattaagtatctaggtctgcaagaaaacgtgcgtatcagaagagcaggttttgcatatagacaagtgtttgagaagttcgtggaaagattttatttattatctccacactgttcttacgctggtgactatacatggcaaggtgataccttagatgctgttaagtatatattgcaagattcctctatcccacagcaggagtaccaattgggtgtcacaagtgttttcatcaaaacacctgaaacattatttgctttggagcatatgagagatagatactggcacaatatggctgccagaatccaacgtgcttggaggagatttttgcaaagaagaattgatgcggccactaagatccagcgcaccatcagggagaggaaggaaggtaataagtatgagaagctccgggattatggtacgaaggttttgggtggaagaaaagaaagaaggtctatgtccttattaggttacagagccttcatgggtgattatctatcatgcaacgagtccaaatcgaagggcgcttatatcaaaagacaagtgagcattaaagagaaggtcatcttttccatacatggtgaggccttgcatacaaaatttggccgttctgcacaaagattgaaaaaaactttcctattaactccaactacattgtacattgttggtcagactttggtccaaaatgctatgacctatactcaggattataaaatcgatgtgcgaaacattcaagcggttagtttaaccaatttacaggatgattgggtcgccattaagttggctagctcaggtcaacctgaccccttaatcaacacatatttcaaaacagaactcataacgcatctgaaaaggcttaacgacaaaattcaaattaaaataggctcggcgatagagtaccaaaagaaacctggaaagttgcattcagtgaaatgtcaaatcaatgaatctgcaccaaaatatggcgacatatataaatccagtacaatatcagttcgtcgtggtaacccacctaattctcaagtgcacaaaaaaccgagaaaaaagagttcaatctcttcaggatatcatgctagttcctcgcaagcaacgaggaggccagtttcgattgctgcagcccagcatgttcccaccgccccggcttctaggcattctaaaaagcctgcccctccaccaccaggaatgcagaacaaagctgctacaagaagatctgttcctaatcctgcttccactctcactgcatcccaaagtaatgcccgtccttctccccctactgctgccactcgtgctacacccgctgctacacccgctgctgccgcaatgggctctggtagacaggcaaatatccctccaccacctcctccacccccaccctcttcaaagccaaaagaacccatgtttgaagcggcttacgattttcctggttcaggatcaccatctgagttacctttaaagaaaggagacgtaatttacattacaagagaagaaccaagcggttggtctctcgggaaacttctggatggctctaaggaaggttgggtgccaacagcttacatgaaaccacattccggaaataataatatccctactcctcctcaaaacagggatgttcctaaacccgttctgaattctgtacaacatgataacacctctgcaaacgttattccagctgcagcccaagcaagtttgggtgatggtttggcgaatgcgcttgctgctagggccaataaaatgagattagagagtgatgacgaggaggctaacgaagatgaagaggaagatgattggtaatcaaaatgtatttagcgagtatatactctatacgagcaaatagagtaaattgtaattaataaatattgatatattatcgccca

SEQ ID NO: 2433 - DNA, 1372 bp, Saccharomyces cerevisiae
ctgttagtaagttgatctagtgtatttattgtattttgctatatcaatggccattgaattgggactttcccgtattacaaaactactagagcatttaggcaatccgcaaaactcacttagagtgctgcacattgcagggacaaatggtaaaggttcagtatgtacttacctatcttctgtgttgcaacaaaagtcctaccaaattggaaaatttaccactccacacttggtgcatgttactgattccattacaatcaacaataagccgattccgttagagagataccagaatattagattacaactagaagctttaaacaagtcacactctttaaaatgtacggaattcgagctattaacatgtaccgcattcaaatatttttatgatgtgcagtgccaatggtgtgtcatagaagtaggccttggcggaagacttgatgcgaccaatgttattccaggcgcaaataaggcatgttgtggtattactaaaatcagtttggatcatgaaagctttttaggtaacaccttgtctgaaatctctaaagagaaagcaggtataataacagaaggggtacccttcacagtgattgatggaaccaatgaggcaagtgttataaatgttgtgaaagaaagatgcaaggctttagggtctgaactatccgttacagattctcaacttaacggaaatatgattgacaccaactcctggggttgttttgacttggcaaaattgccactgaatggagaatatcagatatttaatctcagggtggccatgggtatgttagactacttacaaatgaacgaacttattgatattaccaagaatgaagtaagtacgagattggcgaaggttgattggccaggaaggttatatcgtatggattatcgctttgacaaagtaagtaataggacagtgcctatattaatggacggtgcccacaatggctcagctgcagtagagttagttaagtacctaagaaaggagtacggaaaccagcctttgacctttgtgatggcagtaacgcatgggaaaaacttggagccgctgctccagccattattgaggcctatagatcaagtaattcttactcggtttaataatgtggaaggtatgccctggattcatgccactgatcctgaagaaataaaagattttattttgactcaaggatacacaaaggagatagtgattgaaaatgatttacatcaggtattgccttctctggcgcatgtatcagacgagcaaagacggccaattgttgtatgcggttcactgtatttatgtggtgaattattacggattcacaatagtcacttgagaaactaaataaaataagtaacaacgaacattatatagactatcgatgat

SEQ ID NO: 2434 - DNA, 2096 bp, Saccharomyces cerevisiae
gaaaactatattgttttgaacagaaaaatagaaggaagtactaaaattactctttcaccacacaacaattttaactcaagaagataatcactgcttacttttatattttatagacaatttgcactttggggtatttttcttaattttatctgggtttttttcttctttttacaaagaaactatgctaagaatatgaactcttccacttcttcagaaaatgtgttcataaattcatttagctatttgaatcaaacatcacaagccgtaatctcaggtaactccactttcgcaaatgttatcaactttccttatagacttggattatcctttattggggctgtgaacttgcagtacgagcaaaccgttaaatctgaagaaattcccccaactctaaggtctgtttttgatacaatagggttttttttcagcccgtacgccatattttgctttgtaatcgccattgtcctgaaccggttcgttgtattttacgccgtccttaacaacggttccagacgtactttaccgttatggttgagtaatgttttccatgtatcagcagtagttgtattagcaatggtatccttaggtccgctgaccttgggtaaggatttcaaaatattaggcgaccctgcttttgcccaagaaaaatttttactgaatatattctacgctttcgcttactcttattgtgtcgaaaccatatttaccatcatgcggaattccagccctttggagggcactgactattcattgtttgaactttcgattcagttttatacaatgactaataataatactaaatttttagattctcctgattacattatagactgttctatggctattttgagcaggatattgatccatttggtggagattttcaggcttagaaattatcgtctactttttagtactattatgaacctctgtcatatttgttacttagggataagagttaagcagggcggctggaaaagccttccattttcggtgaaatttaggcactttccaaaactgttttcagtgtctattatttgcttatcattactgatttttaaattatcatgcttaattagatgggatccatttggaaaatcacgtaattcttgcgaacttttacagttttaccctctcagtagaaattggaaaaaatacttaaattacacgggagaagaagatttttctgctatggccactaaattcgcactattattatgctcaggaactgaactaatggaaaagggtatacgaagagaatttcctgctattaacatcccggataatgttaatgagaaattttttattagcggttatttaaatgaactttctaaaccgtataaagagaacacttccatcagcttcccaaagaaaaattcatcaatattaaagcaaagattttttttaatgtttccaaaatctataatatggatcatgaagaagcttgtaggccaagtattctttggcttcagagataacaaggacgaggacatccccgacaacgacccatcaaaaatgttaaagataactaaaacgaactctctcaataatagtgccggccacaaagaagatattgaacttgaactattgaacacatcagatgatgagtattctgaagattacgagccttctgaagttgagtcactgggggattctgatgaagaaaacttggaagaagattcactgattttcaacgaaactcgggatgccctactggatttattttcttccgaagataatgaagttcatactgattataattggatcatgtcaactagccgtatccttcaacaaaaattactgtcagataaaactttgacaagggcgtctatcttagatacaaagttaagtgaagtagatgagacttttggtacagaaagtgattttgatctatcttgcgcggtatgcaaagtcaatgaaagaaatacagtattatggccctgccgatgttttgccatttgcgaggattgcagaatttctttgggtttacgtgggttcagcacttgcgtatgttgtaggagtaaagttcatgggtactgtaaggttcatcctgtttcagatagtaaataatagtttaagaacttttgcatggtatctaa

SEQ ID NO: 2435 - DNA, 547 bp, Saccharomyces cerevisiae
catcaaacacaaaccccaacctaatcgcaaataacctgaataaaaatggccagcagtacttccacttccgcttccgcttcctcctccatcaaaactaacagtgccttagtttccaacaatgtcgttgccgcctcttccgtctctgctacttctactgctagttccagtgccgctaagaacactacttccagttcaaagaacgctgctccaggcatggttgcaaaccctgtttcctcgaagtacggtatcatcatggccgcatttgctgctgtttctttcgtcctaggcaccggtatttaagaagtttctaaaagcctttttttttccttctgcttattgtactatcaaagggaacgattgattaacagaaaaattacataaaaatcatatcataatggactcgcggttgacgcctagttaaaccaatgaagaggtgggcgaacttgtgggagttatatatatttaggccaattgggccattgcatgtttcctataatatattttaatataaaaatttatttattaatacagcaactcattagattaa

SEQ ID NO: 2436 - DNA, 443 bp, Saccharomyces cerevisiae
tcgcagggatataacttcgaaaatttctcaaaatggccaatttttttgttagactgtgggaaagtgtatttgaaccagggacctccccccagctgatcatcgccacacacgtatcttttgttgcactactactgaccctcatctggctcatctatgccacaaacgggaatatccacttctatgctcttttctgtatatcacttttactatggattaccgttatctggtttataaacgaattatcacacgtcaaattgaaggataatgatgagctggataaagatgccaataaaaaggacgacagtgccatcaaggaagacagcgaagacaagcaagaaagcgggaaatccactagtactgccagacggactcaagcacaatctaggtcaagaaaagcatagacagatacataattgactacataattatctctgttattagta

SEQ ID NO: 2437 - DNA, 2803 bp, Saccharomyces cerevisiae
acagaaggtatattgctaatcaaaacgactttggtatacgcgtttggggctacaattgcattttaaatatatttaagatgtttaatagaaaaagaagaggagacttcgatgaagatgaaaattaccgtgattttaggcctcgcatgcctaaaagacagagaatcccacctgttgtacaactgtgtaaagaaatgatgcccgatattcgcactattggtgaatctgttaaagcttttgaagatgatatcaaattcttgagtgaagctataatgaatgagtatggccatgaggactactttaataatgctttactgagcactttaaacgctgttgttgtggagcaaccacagaagcaagctgctatcgctctcttaaccatggttgttaattcgaaaaataatgttgccggaaagagtattatcaattacttcttcgaagaattacaaaaatggtgcaagcaaacatataatgatgaattcaagagtacgtcaaatgaaactgggccatggaacaagatcaagttaatcctgagatttttatccattctatcgcccatgtttttagttgatgaactaatcaatatctacaagagcttatttgaattgagtatcgaattaaacaatctggatccaggtaacagagttcctttatctgaagcaatttacaccaatacattattaaatatcccgtatttgttcttttttaataggaataatgacggtttgaggacaaaagtggaggagttacttgcatacgttgaacaaaactatctagttaaaacaacggatataaacctattaagagaatacaatggtgaacctccatatgaaatggtagaacttgtccgagtcgtattaccaaacgtcaagaaggcgctaatcaataacttggaacagctgaatgaattatttcctgattggaatcatttattaactccccaaaccggtgatgaagggttcaatgacgctttaacccttccatcagtagatgatctaaagtctttcgtgcgcttgaataaaaactttggttcagttgatagcatgtggaagacaccaaggtatgcttttcatgtttacttgccaaactccgctggtaatttcgaaacagttgtaccaatcagcacttatgctggtcaattattcaacgatatcattattgatctggtggaaagtttagaattcaatagaaaggaagtagctagacaagtgataactttggatctttttttcaaagcaggtatatttacagaacctggtgaatctattgcccaattaattgccacttatgaagagaacccattggctcctacatttaagatagaagatttggctattgaaaccattttgggacttatttttaaattacctagtgtttcccagccttttgcatacttttacactttattggtggatatttgtcaaaattctccaaaagcaattgctcctgtctttggtagagcctttaggtttttttatagtcatttggattcattagattttgaactaaaattaagatatttggactggttttcaattcaaatgagcaactttaatttttcttggaagtggaatgaatgggaagacgattcgatcaaatttggcaagtatttttataatccaaaggtaaattttgctaaaaatttgattcaaaaagaactacgattgacctctaacttttcagaagtagaggacagcctaccacaagaattcacgaaatatttggatacttcttacattccaagagatcaactgattaactactatcaatcattattcaccggttatacggtagaagaagattccgttagaaaaaatgatctatattttagacaagaaggtgtacctatggaaaacacagtccgtaaaattttagattatacccacaaagcaaacaattctagggaagttactgaattagaaagtattctaggtgagttaaagaatgagtatggttccataatttccgactttaacagatttgttatcatattgttagtccaggccgttacagactctggtagtagatctttatcacatgctaataaatatattaatgatttaaaagaagatctcaaaaccatatttgcgaagattgaattggatatcgagacaaaagagtatatcataattgaagccgtcctaacattttggaacgccaaccctcagacaggtttcttagtagcagatgcattcaaatatgcaggtttacttacttccagaaccatttttacatttatatttaacgaaactggtttgaagaataatggtttgattgaagctacagcaattgaagcggtctttagaaatttatctcaacaaatctcggaagagaacgaaagtggaaataattttgagttcgttttcgaaagattatgtaccatcgccaacagtactatagacttactagatgtcaatgctgatgaagatattgagatacctaaagtcaacggggaaatggacatcgacgatattgaagatgataaactggatttgaaatggaaatattttacagtgattgggtttattaaaagtatattaagaaggtattcccacgaatatcgtgagttagcagacaaattcattgccaacattgataacgctattccacacgaatccactaggagaacaatttcgaattggattcaagaaacaaaggaagtttaaaaagattcggaggatggactacattcgttatcactccgctttttaatttttaatcaatgttacatacctagcgtaattttcctatatataaaatatcagctttatataaatatattattgaaactgtacctataataata

SEQ ID NO: 2438 - DNA, 4180 bp, Saccharomyces cerevisiae
aattcaaaacggattatagatttatcataccagatacgtttatcaggaggcttgtataatggagcacagatataacgtgtttaatgatactccacgagggaaccattggatgggcagttctgtgtcaggatcaccacgtccatcttatagcagtcgtcctaatgtaaacacaacacgacgcttccaatatagtgacgatgagcccgctgagaaaatccgacctttacgctcgaggagctttaaaagtactgaaagtaacataagcgatgaaaaatcaaggatatctgaacgtgacagcaaagaccgctacattaatggtgataaaaaggtagacatttattcactgcctctaatatcaaccgatgttttagaaatttccaaacaaaggacatttgcggtgatattgtttttaataattcaatgttataaaatatatgacctggtaatacttaaatcggggttaccgctttcgggtttactgtttaagaactatcgatttaatttcatatccaagtatttcattatagattccttcttcctgtatgttttaccatcctttaacattcctaggttgacttttaagccatgggttgtttatctccagattttagctatgctactattgaacattttcatatcaagcgatcacgagttcgttttgatttcattaattatgaccacatggagaaaactttatacgaaagaattaagtgtaacaggttcagccattaaccatcatcgtatttttgattcttccgctcattttaagggtgctctaacaatcaagatcctacctgaaaacacagctatgtttaatcctcttcatgaatcatattgtttgcccatggataccaatctttttaaaattaactcaattgacgtacccatcagaataaactcaactgaagagattgaatatatcgagttggaatatagagatctttacacaaattcggtagagttacggtctttgagtaagaaagacttcaaaatcatcgataaccccaaatcctttttaaaaaaagatcagtcagttctaaagtcacattcaaacgattttgaagaaggcagtacaattcgttatttggctgtaactcttcaagatattggcttttatcaaatcaaaaaaattgttgattcaaaaaaactgaatttaaagatccatcagtcacacttggttgtaccctactgtccaattgcatctattactggaactggaagcaatgatagatgtattggcgattcagataatgtttcttttgaaattcaaggtgtgcccccaatgaaattagcatactctaagatcgttaatggtcaaactttttcatatgtagactccagcttgcaaccagaatattttgagtctcctttgcagtcaagcaaatccaaacaaagttttactcaaggagaactaaacgatttgaaatggggaagaaaccaacctgttaatattaatttagactcttccattacccaggacggcaaatttgcatataaaattgataaaataactgatggtctgggaaatgtcgtggattttacatctctccctgaagaattaaaaaagcgctatgatctatcttataatttcaatgttcatgaggttccacgtgcagcgctagaagaaagatttgatccaaagtcacccacaaaaaggtctattgccatcgtgtttgaagaaatcaaaaactggatttcagacattccatatgttattagcctatcctatactgatgcacaagacaagtcgaaaaagataatgaatgttactacagattctttgaccaaagtgttgcaagcggatcttccggggtcatataacttagaatatattgaatctaagttttgtccaggtgaaattgtgggtaaatcaaacgttcttgtaactatgccagttgcacctactatggaagttaaatcatttccaatattggaccagtgtgtgggacaggttggtctaaactttgaactatcttttactggggctccaccatactattataacactaaaatctataagcttgaaaacggtgaaagaaagttatatgatgcaaagagatacacctctgaaggtacgagaaatcgcttcagctatagtccacctaaagaaggtaactatgaaatcgtgtttgatactgtttctaataaattattcactgaaccaatcaaattggaacctgtaaaagaatatactttcaagacatcaatgagggtgaaaccaagcgcatcactaaaattacaccatgatttgaaactctgtttgggtgaccacagcagtgtcccagtagcactaaaaggccaaggcccttttacgttaacatatgatatcattgaaactttttctagcaagaggaaaacttttgaaattaaagaaataaaaaccaacgaatatgtcattaaaacaccagtctttactactggtggtgattatattctatctttggtttctatcaaggattctaccggctgtgtagttggactcagccaaccagatgctaaaatacaggtgaggagagatattccatctgctgcattcaatttttttgaacctatcaaagaagctaaaattaagcacggttctgtcactgaaattccgctcaaattaagtggagaggggccattcaccgttaagtttaaacacatggattacgatggaaacattgtgaaagaatttgaaaacaaatttcagaatagttataagcccgctttgaaagtaagtaaagaagggctttaccaattggtcgatattcgtgactcaagttgccaaggtaatgtgatttaccggaacagtctgtataaggtatctttcttggagaagccaaaatttgcaattcaagacaatcatcacattacaaaagtaacggaaaatttattctctaaagaagaagtctgtcaagggatggaaggtacggttgatttggctctatttggttctccaccattcatattagaatatgatttgatggcacccaacggtcatatttctacaaaaaaaattcaggtggcaaccaaatacgcttcactgaaactgcctaatcaaattcctggagagtacataactactattaaggccatcttcgatggcaattatggtgaaagcgacatacattttagagaacatcagtcggagctcataatcaaacagacagtgcaccccattccagacgtcgcctttgctgatggtggtaaaaccttgcgtgcatgtgctgctaatgtagatcaaatctcatttttggaaccaataaatttgaaatttttacaaggcgaaagcccattttcaatcacctttagcgtttatcacgagagtaccagtaggacagatcagtataccattgacaacattgactcagagaacttttcatttgaaaagttatatgaagggatgaagttaggtaaccatgccattactattgattctgttgttgacgcaaatggttgtgttaacagcctcatatctggaccgcgtaatcaaattcttgtgtcaattactgatgcaccaaagatacatatattagatccttctaccgagtattgtgttggggactatgttgcatatcaattaaacggtgtggcacctttcatgattaagtatgaattcaacggtattccactaaaatctaaggaacgcagctcccaatttgttagattagcatctgaaccgggcattatatctatcacttctttacaggattcatcatcacaatgcattgtcgactttacgaaccctaaattaaagagtgaatttgatgacttatctttaaacatacatcctattccttccgtaactgtttctcaaggaaattacgttactgaggatatccgcgaaggtgaccaggctgaagtaatcttttcgtttgaaggtaccccaccattctcactaacttatgtaaggacagaagagactgatggaaaacacggcaaaaggaggtcgcaggttgttgagacgcataaagtcactgatatatattctcatgaatacaaggtaattacaagcttgcaaggtacctacgaggcgattgaaattacagatgcttattgttttgccaaaaatgatctttttttcaataactaaatattacaagaaagtctgatgaaatttttctttcccgcaatatttttgtacaattgtaatgtataatatatctctgtacatcagtattaaaatacttaagaaagcgaa

SEQ ID NO: 2439 - DNA, 1064 bp, Saccharomyces cerevisiae
gcgctgagacctttgtcctttacggtctatagaggtgtgttaaaagcagacttttgaacatccacagaaattggctcaatgacctatccgaaaagaatacctataaatgcgtggtctgaagttcatagggtggcaaggccactaattattactttcgacgcatataatacactatacgccacaaaacttcccgtcatggaacaatactgcattgttgggcgtaaatatggtatcaaggcgaatccttcgactttaacaaacaattttccacacgtttttaaaaaactgaaggaagactatccccaatacggaaaatattctggtatcaagcccgaacaatggtggtccatcttgattaggaacgtcttcgcaccaaacgaaattcccgatgagatgataaatgaaatattaatgcggtttgagggcttcgattcgtattttgtttatccagatttgatcaaatttttaaaggatttgaagtcaagacatcctgatgttatcttaggaatagtaagcaatactgatccaattttttacaaattattaaagaatatcggattatttgagacattttccggtcacatttatttatcatatgagcttaatctcgccaaacctgatagagcaatatttcaatatgcgcttgacgatattatatctaaacaacctcatttactcgaaaagtacaccagggaggaaattctacagcattgctttcacatcggagatgaattaaagaacgatctcgaaggggcagaagctgccggttggactggtatactgttagatagaaatgataaatacgggtttctttcaaactcgattagtaaaccaatgcgggacgaatacaagctgtcaattgataaaatagataataattcaataaacacttgggaagccaatactaagcaaactgacacgttacagttgagtgaaagaaagtacgttgtttcgaatcttgaggttttagaggaactctttccctgagcgcctaacgttacagtaacaaatatgtatgatagatattattcatatccgccagtaatatttactatatctttgaa

SEQ ID NO: 2440 - DNA, 1422 bp, Saccharomyces cerevisiae
gaaggagtggtaggaagaccagcagattatttccaatcggtcgttgccattgtcttatttccttttctttctggcgcattgcattttaacacctttttttccagaatagccaaccaccgacgtctgattcacacattactgggcaagatcttgacatagcattacattacaacacggcaacactaatcacgcaacgctagaactcgcgcaggatgaatattcaaagcaataattctccgaatctcagtaataacatagtgtcaaaacaggtttactacgcccatcctccacctacgatagacccgaatgatccggtgcagatatctttccctaccaccgaagtagttgggcatggttcgtttggtgtggtatttgccactgttattcaagaaactaatgaaaaagttgctattaagaaagtcctgcaagataaacgattcaagaacagagagctggaaataatgaaaatgctgagtcacataaatataatagatctgaagtactttttctatgaaagggactcccaagatgagatttatttaaatttgatactagaatacatgccacaatctttgtaccagaggttacgtcatttcgtccatcaacgtacgccgatgtcaagattggaaataaagtactacatgtttcaattgttcaagtcattgaattacctccatcatttcgcgaacgtctgtcatagagacattaagcctcaaaatttattagtagatcctgagacctggtccttaaaactgtgcgatttcggcagtgcaaagcaattgaaacctactgaacctaacgtttcctatatttgttcacggtactatagagcaccagagctaatcttcggcgcaacaaattataccaaccaaatcgacatatggtcctctggctgcgtaatggcggaactgctattgggccaaccaatgttccctggagaaagtggtattgatcaactagtggaaatcattaaaatcttaggtactccatcaaagcaagaaatttgctctatgaatcccaattatatggagcataagttcccgcaaattaaaccaataccattgtcacgtgttttcaagaaagaagatgatcaaactgtggaatttctagctgacgttttgaaatatgatccactagaaagatttaatgctctacaatgcctgtgtagtccatattttgatgaactaaaacttgatgacggtaaaataaatcaaataacaactgatttaaaattgctagagttcgatgaaaatgtcgaattgggccatctatctcccgatgaactatcatctgtaaaaaaaaagctatatccgaagtctaagtaatgatagcaccggagggagcccaggcaagaataatgggagaaggaaggaacatatatacgtatgtctttttttagtactattattactgttattatta

SEQ ID NO: 2441 - DNA, 545 bp, Saccharomyces cerevisiae
gtaaagtatacaagagaagaatcccaagatgtcagctgtcccaagtgttcaaacttttggtaagaagaaatcagctactgctgttgcccatgtcaaggccggtaagggtttgatcaaggttaatggttctccaatcactttggttgaaccagaaatcttaagattcaaggtttacgaaccattattgttagttggtttggacaaattctccaacatcgatattagagttagagttactggtggtggtcatgtttcccaagtttacgccatcagacaagctattgctaaaggtttagttgcttaccatcaaaaatatgtcgatgaacaatccaagaacgaattgaagaaggctttcacttcttacgacagaaccttgttgattgctgattctagaagaccagaaccaaagaaattcggtggtaagggtgctcgttccagattccaaaaatcttaccgttaagaaattgtggggattatttttcgctcttttcattttcttataattgtataccatcaataaacacaacagcctttaatttacgtaa

SEQ ID NO: 2442 - DNA, 862 bp, Saccharomyces cerevisiae
gttttgatatttcataatcacctatttttgaagcaatacttttggacaacaagatagcattattattaggatttccctatcaaagagtcatttccgtgcacttcgtgaaaaatccagtcagaaagttcagcaagcagtcaagaatatctacttttgtttccaagaaaagccttacctgacagcgttcaaagtctcctttgccattggacttgttattccgtgttccctactttttttgataatggtttctaccgctacatttttcttttttgtttacttaacccttttcgtagtgataggtttcttctcctcattattcataatacccttattgggcatttcctttgtgtttgccattggcgtggtatcatttggcttctgcagcaacatgagtttcaaaatggcccaactcatttatgtccgagctgacgccttcttgaaaaaagtcctcgacaaaatggccctacaaacacagccggcacaactacaggaaccacaggagccactttccacattaaggccagtatctaatccaactattccaagcccattaagacaaacggcgcgcccttctaaattcgtcaccgaagaagatgttattttcgaacctgttagtgctcaaagcgccattgcccgttcattagagactactgctaataaagcgggtaataagttccagctctcttaacctcggcaataaaaaaacatttttcgcaagtttagcaggtcaataataataatatccttataaattacactcagttttttattacatatgggcctttagtatatacatacgcatatatcttagctttaccgatcttctaatattgcggcctataacgcatagaccataaaagaa

SEQ ID NO: 2443 - DNA, 1020 bp, Saccharomyces cerevisiae
cttagctttaccgatcttctaatattgcggcctataacgcatagaccataaaagaaacggagcagatgcaattcttcaaaacacttgcggccttggtgtcgtgcatatcgttcgtcctcgcttacgtggcacaagatgttcatgtatcattcccctccaccgcaggaaagtctagggtaatgatcggtaaagttgaacccagaataggaatcgatgaaactgttccgactacaatcacagttgaagaccctaacgaggtgattcaagtaaatttcgccattgagtctaccaacaaacccttccagaacaccttattgataggcttacctaataagaacctagaaatggcttttgaacccgaaattaaggacaatggcaagttgtccatgtataaatacaggatagatttagccaagctggatgctgctttgttgcaagaggcttccagatcaccggaaccaataaaggccactttgattctagcgtcatctaccgccaaaccaaaggaaaacttgttcagggaaattctgcaactcaacctgaacttcgatgtagatcactcagattcatctttagttgacaaattcggcattaagccagaaatccatcatatatttcatgccgagccaaagagagttgccaaaccaattgctgtgatttttgttttaattatcttcattaccattttatctttaatagtcacctggttgaattcttgtgccgccgcattcaataacatcccgaccggtgtcactgctgtatatttcctaggattcatcgccacgattgttgggtttgaagttatcttcgctaggtactacttgggtacaagtatttttgaaactctattttcctctttgtacttgggcgctccaggcttactgacatctaccaagttcctgagatcttttggtcaaacaatctagattgttctgaagatcaaaataatatatatatatatatatatatatatatatatgtttatacacttaacttacgtacaaaaatatagatttcgaa

SEQ ID NO: 2444 - DNA, 1243 bp, Saccharomyces cerevisiae
tttgaatggagtaaaactaaaatatttcggcgtttctattatcgaacaacaaaaggtaatactttaaaactatgtcagacgagattgtaaccaacaaatctgttacttatgttaacaatactactccagtcacaattacatcatcggagctggacttgagatcatgttatcaagatgacgaagttgttatagaagtccatgctgctgctttgaatccaattgattttattactcaccagctttgtaactcctacatatttggcaagtatccaaagacttattctagagattacagtggtgtcatcattaaagcgggaaaggatgtcgacaatcgctggaaggttggcgacaaagtgaatggtatgtacagtcatatttatggtgaacgtggtactttaacacactacttgatactcaaccctgccaaagatgtacccatcacacatatggtggaggttccaaaggacgaaaatgacccatatgacgactttgtatatgctgctgcctggcccctaacatttggtacagccttttctacattatacgatttcaagaaagattggacttctgattcgaaagttctggttattggcgcttcaacctctgtgtcatatgcttttgtccatattgcaaaaaactacttcaacatcggcactgttgttggcatttgtagcaagaattccattgaacgcaataagaaattaggatatgactacttggttccctatgacgaaggatccatcgttgagaatgttaagaaattaaagcaaagcgtgttggaaaacgacaaatttgacatgatttttgattcagtgggtaaccatgatttcttccctgtcattgatcaatttctaaaacctaaggcgaaaaattccttttacgttacaattgcaggaaataacaaggccgattataagaatatcagttggagagatttcgtatcattgagttctattttaaaggctataaacccattcaaaaaatacaactggcgctttggacacccttatccccccaacaacttcattgaagttggcaacgaaatgatcaagaagggcacttataagccacctattgattccgtctacgagtttgatcaatataaagaagctattgacagactgatgtccaacagagctaagggtaaagtggttgttaagatgaaatgagggcaatattttccacataaacttgttagtatatttagttaaactctataattataattgttattagtttttgt

SEQ ID NO: 2445 - DNA, 1618 bp, Saccharomyces cerevisiae
ccaaattctctctgcactctcaataacatagctttttaaaatggcagaccttcaaaaacaagagaatagtagcaggttcaccaatgtttctgttatcgcgcccgaatcacagggacaacatgaacaacaaaaacagcaggagcagctggagcagcaaaagcagccaacgggactgttaaaaggtttaaacgggtttccgagtgcaccacaaccgctgttcatggaagatccgccttctactgtctcgggagaactgaatgataatccagcgtggttcaataatccaaggaaaagagccattccaaattcaataataaagagatcaaatggccaatctttaagccccgtacgttctgatagtgcagatgtacctgcgttttccaattccaatggattcaacaatgtcacttttggctctaaaaaagatccacgcatccttaaaaacgtatctccaaatgataataacagtgccaacaacaatgctcatagttcagatttaggtacggtagtttttgattctaatgaggcaccgcccaagacctccttggcagattggcaaaaagaagatggtatattttcaagtaagactgacaatattgaagatcctaatttgtcttccaacataacctttgatggaaagcctacagccacaccttcgcctttccgtccactagaaaagacctccagaatacttaatttcttcgacaaaaacacgaaaacaacgccgaatactgcgtcaagtgaagctagtgcagggagtaaggaaggggcctcgacgaattgggatgatcatgccattattatctttggatatccagaaacgattgcgaattctattatactccattttgctaatttcggtgaaattttagaggattttagagtgataaaagattttaaaaagttgaattcgaaaaacatgtcaaaaagtccgtcattgactgctcaaaaatatcccatatatacaggagatggatgggtcaagttgacttacaaatccgaactttccaaatctcgtgctttacaagaaaatgggattataatgaatggaacattaattggctgtgtttcgtatagtccggctgctctcaaacaattagcttccttgaagaaatcggaggaaattataaacaataaaacaagttcacaaactagtttaagctcaaaagacctcagcaattatagaaaaacagaaggaatttttgagaaagctaaggcaaaagcagttacttcaaaagtgcgcaatgcagaattcaaggtttccaagaattctacttccttcaaaaatccacgcaggcttgaaataaaggatggtcgttcattatttttgagaaacagagggaagatccacagtggtgtcctgagctcgatcgagtctgacttgaagaaaagggaacaagcgagcaagagtaagaaaagttggttaaatagattgaataattggttatttggatggaatgatttgtaatgaaaaaccttacccccaaatgtagtgctttggtgcgattccagcatcctgtgatgttcacctacttcaaggttatataattttgtgtgtagaattgtaaaaaggatggatagacagttcttgagataaagcacagttattttggtatca

SEQ ID NO: 2446 - DNA, 596 bp, Saccharomyces cerevisiae
gcgaccacatacacctttttttcgatctaaactaatcgcccaaaatgtcgttggtcaaacttgcgaatacgtgtgctcatttacagaactgctcgaaagttagagttgccttaacatcgatcccatatacgaaattgcagctacagtttgcgtataacctttaccaacaagggttcttatcgtctttacagaagggatcgactatgggaccagacaaagattttgttgaagtaacaccagacaatatctctactagaaggctttgggttggattgaagtatagagataacaaacctgtcctcagcagctgcaaattaatttccaaaccaaattcaagaatacacctgccaatggaagacatgaagaaactatgctctggcgtaactattagaaacatcaaaccactacaaccaggagaactgattctagttcgagctcataacaacattatggacattaatgaagccatatccaaaaagttggatggagaagtactatgcagagtaaaatgaatagaacaatcacatatgaccgtatttatacgtgtaattaaaaaatatacggaccatgtaaataataatattataaaatgcaga

SEQ ID NO: 2447 - DNA, 976 bp, Saccharomyces cerevisiae
gcaatataacttgtggaaggtctataataggaagaacatgtctttcactgaggatcaagaaaaaatcgcgctagaaatactgtcaaaagacaagcatgagttttacgaaattttgaaggtagataggaaagccacagatagtgagatcaagaaggcatacagaaaactagcaatcaaattgcatcctgataaaaactctcatccaaaagcgggagaagctttcaaagtaattaatagggcatttgaagtactaagcaatgaggaaaagcgcagtatttatgacaggataggtagggatcctgacgatagacaaatgccatccagaggtgctgcttcagggttccgaggaagtgcaggtgggtctccaatgggtggcggatttgaagacatgtttttcaattcacgtttcggtggtcaaagagctggaccaccagaggacatattcgactttttgttcaacgcaggcggcagcccattcggcgcttcaccatttgggccttctgcttccactttttcatttggaggccccggtggtttcagagtttatactaataatcgtggtggctcaccgttcatgcgtcaacaaccccgctcaagacagcagcaacaacaagcagaagaaaatgcagtgaattcgcaattaaaaaatatgctcgttcttttcatcatctttattgttcttcctatgattaaagattacctgtttagttaaacacaatatttttactgtcatttttttattattttccaacgttagtcaaagttgtactataaaataaaactacaaggagcaagcaaaattgaaaaaacgcatttgtatactagatgacatttaggtcattccttcaggcttcctggctatgttttattttgttccacagtttaccagaaggacataatggtattagaattttaatatatcgaggaaattaaatcagacagtataatacttataaacatctttattttctgataa

SEQ ID NO: 2448 - DNA, 1405 bp, Saccharomyces cerevisiae
actgatatatacggtattataagtgaacgaaaaaaacagcaatgggtttatttgataaagtgaagcaatttgctaacagcaataataacaacaatgattctggcaataacaatcaaggcgattatgttaccaaagctgagaatatgatcggcgaagatagagtcaatcaattcaaaagcaaaatcggagaggacagatttgataagatggagtccaaggttcgtcaacaattttctaatacctctataaatgacaacgactccaacaacaacgactcatatggttctaataacaacgattcatatggttctaacaacaatgattcatatggctctaacaacaatgattcatatggctccaacaacaatgattcatatggctctaacaacgatgattcctacggttcttccaacaagaagaagagctcttatggttctaacaatgacgattcgtacggctccagcaacaacaatgactcttacggttccaacaacaatgactcttacggttccaacaacaatgactcttacggttccaacaatgacgactcttacggttcgtcaaacaagaataagagctcttacggttccaacaatgacgattcttatggctctaacaatgatgattcatatggttcttccaacaagaagaagagttcttatggttccagcaacaacgattcgtatggttctaacaacgatgattcatatggttctaacaacaatgattcatatggctctaacaacgatgattcctacggttcttccaacaagaagaagagctcttatggttctaacaatgacgattcgtacggctccagcaacaacaatgactcttacggttccaacaatgacgactcttacggttcgtcaaacaagaataagagctcttacggttcttctagcaacgatgattcttacggatcttccaataacgacgactcttacggttcttccaacaagaagaagagttcttatggttccaacaatgacgattcttatggctctaacaatgatgattcatatggttcttccaacaagaagaagagttcttatggttccagcaacaacgattcgtatggttctaacaacgatgattcctacggttcttctaacaaaaagaagagttcttatggttccaacaacgatgattcatacggctccagcaacaacaatgactcttacggttccaacaatgacgactcttacggttcctctaatagaaacaagaactcctatgggtcttccaactacggttcatccaacaatgatgactcttatggttcatctaatagaggcggtcgtaatcaatacggtggtgacgacgattactaagtttttggatgtcttcgataaaaaaaatatattattgtgtttagacttaagtatgaaaattttatgtatga

SEQ ID NO: 2449 - DNA, 1008 bp, Saccharomyces cerevisiae
gaggcaaagtatatactgtcaagggtataatggtgaaagtaactgcagcttgtatcataattggtgatgaagtgctgaatggaaaagtagttgatacaaattccactttttttgcgaagtattgctttgatcatggaattcaattaaaagaaattgcaactataggggatgatgaaacccagatcgtagatactgtgagaagattagtcaaaaattatgattttatcatcagtacaggtggaatcggccccactcatgacgacatcacttacgaatgtatggcgaaaagctttaatttgccttgtgaactagatgaagaatgcaaagaacgaatgaggcataaatctgaccctgaagcaaggcttgatgcagatgctctaaaggcgcattaccaaatggcaaccatgccaaaaggcacaaacgtcaaaaattattatgtgtgtgatgacttgtgggtacctatttgttctatatctcacaaaatgtatatactacccggtatccctcaactatttgcaaggatgctgaaagcgttcactcccacgttgaaaaaaatatataatttggacaaggatccacgtgagtatgttcgttattttgtcagaacacacctaactgagtctcaaatttctaaagagctaaagttgattcaggatgaatcaacaaaagtttcagaagccattaaaataggctcatacccacattttggtatgggattcaatacagttagtattttgggtgaaaagaaagacgattcatatctgaagagtattgtcaatagagttgttaataacctcgagggagaagtaatttcttctgaacttgaaaacaagttctcgaaccaggagagctgaatacccgagtatttagaactatgtatagatatagattttttttttgggagcaaagtcatctcagtcatcgccggtagttgcgctttcttctcaacaaaaaagtacactgctcgtggtagaaaggtaccttgaaaaattaaagatcacattgcta

SEQ ID NO: 2450 - DNA, 702 bp, Saccharomyces cerevisiae
tcgtcaatctatttccgcacatactattacgtacgatggctattaaaccaaccaaaagttttcagaattgtctagaagctgaagtgcctggttataacgactgtccgacagttttgttttctatcgaccctaatagcggacctagatccaaatctaaacaaagaacgaaatcgaaaagatgtgttagcggcagacttgccacagaagtgttagatctttatgggaacactaaaacagctactacgccgccaccagttttgaggaggccatctgtaactgctgctcaacaagaatctgcctgtgaaggtgtgctcgtaaaagaccaaggcgatagacagctccagccgatattatgcagtaaagaagaattagtggctaagatcaacgacctctgtgtgtgtggctcgaagctctcttcgaaggagttggaattttacaagaaaaaattagattcaaacattaccaagattttacaaaacgagcacaccaaaacagtactatcccagattttcaatgaaaaagacaaaaatatggccgtgaaaaccattaaacattggatggttactgacacaacaatctcaaattggtgtcccgcattcttaaaaatttttgaaaatgcgatgcctaattaatcaataatattattatatttataaatagaagtacactacgcagaacattttattttctaaaaaaaaaaag

SEQ ID NO: 2451 - DNA, 2234 bp, Saccharomyces cerevisiae
gaaaaatagaatcattctgaaatatggctggtgaaacttttgaatttcaagctgaaatcactcagttgatgagtttgatcatcaacactgtctattctaacaaggaaattttcttgagagaactgatctctaacgcctccgatgctttagacaaaattagataccaagctttgtctgatccaaagcaattggaaaccgaaccagatttgttcattagaatcaccccaaaaccagaagaaaaagttttggaaatcagagattctggtattggtatgaccaaggctgaattgattaacaatttgggtaccattgctaagtctggtactaaagctttcatggaagctctatctgctggtgccgatgtatccatgattggtcaattcggtgttggtttttactctttattcttagtcgccgacagagttcaagttatttccaagaacaatgaggacgaacaatatatttgggaatctaatgccggtggttctttcaccgttactttggacgaagttaacgaaagaattggtagaggtaccgtcttgagattattcttgaaagatgaccaattggagtacttggaagaaaagagaattaaagaagtcatcaagagacattctgaattcgttgcttaccctatccaacttctagtcaccaaggaagtcgaaaaggaagttccaattccagaagaagaaaagaaagacgaggaaaagaaggatgaagatgacaagaaaccaaaattggaagaagtcgatgaagaagaagaagaaaagaagccaaaaaccaaaaaagttaaagaagaggttcaagaattagaagagttgaacaagactaagccattatggactagaaacccatctgatatcactcaagaggaatacaatgctttctataagtctatttctaacgactgggaagacccattgtacgttaagcatttctctgttgaaggtcaattggaatttagagctatcttgttcattccaaagagagcaccattcgacttatttgagagtaagaagaagaagaacaatatcaagttgtacgttcgtcgtgtcttcatcactgatgaagctgaagacttgattccagagtggttatctttcgtcaagggtgttgttgactctgaagatttaccattgaatttgtccagagaaatgttacaacaaaataagattatgaaggttattagaaagaatattgtcaagaaattgattgaagccttcaacgaaatcgctgaagactccgagcaatttgacaaattttactctgccttcgctaagaacattaagctgggtgtacatgaggacactcaaaacagagctgctttagctaagttgctacgttacaattctactaaatctgtcgatgaattgacttccttgactgattacgttactagaatgccagaacaccaaaagaacatctattacatcaccggtgaatctctaaaggcagtcgaaaagtctccattcttggacgccttgaaggctaagaactttgaagttttgttcttgaccgacccaattgatgaatacgctttcactcaattgaaggaattcgagggtaaaactttggttgacattactaaagatttcgaattggaagaaacagacgaagaaaaagctgaaagagagaaggagatcaaagaatacgaaccattgaccaaggccttgaaggatatcttgggtgaccaagtggagaaggttgttgtttcttacaaattgctagatgctccagctgccatcagaactggtcaattcggctggtctgctaacatggaaagaatcatgaaggctcaagccttgagagactcttccatgtcctcctacatgtcttccaagaagactttcgaaatttctccaaaatctccaattattaaggaattgaaaaagagagttgatgagggtggtgcacaagataagaccgtcaaagatttgactaacttattattcgagaccgctttgttgacttctggtttcagtttggaagaaccaacttcttttgcatcaagaataaatagattgatttctttaggtttgaacattgatgaggatgaagaaacagaaaccgctccagaagcttctaccgaagctccagttgaagaggttccagctgacaccgagatggaagaagttgattaatctcttttttcgccttcatgttttatatattatataaatttgtttacttatttttactatttgtaataatgattctgctttacgcgcctttaa

SEQ ID NO: 2452 - DNA, 3342 bp, Saccharomyces cerevisiae
caggctcgagtggcacaattttcttctcttcaagttccagtgaattagtctttctcgtgtgtaccaatcttactgtattgattgctgcgcgatctaaccatcaactaaccacagtttattggaaaaacgtttcctaataccaggaagataacatgcttaggacaagagtgactgctctcctttgtagggctactgtcaggtcaagcaccaattatgtttcattagcgaggactagatcattccattctcaatctattttgctcaaaacagccgctacagacataacgtctacacagtacagcaggattttcaatcctgacttgaaaaacattgatagaccgctagatacttttgctagacgtcatttaggtccttctcctagcgacgttaagaaaatgttaaaaacaatgggttatagcgatttaaacgcatttatagaagagctcgttcctcccaatattttgaagagaagacccttgaaactagaagctcctagtaagggattctgtgaacaagaaatgcttcaacatctagaaaagattgccaataagaaccactataaagttaaaaatttcataggtaagggttactacggtacgattttaccaccggttatacaaagaaacctgctagaaagtccagaatggtatacttcttatacgccctatcaacccgaaatttctcaaggtaggctagaagcgctattaaactttcaaacggttgtttcagatttgactggtttgcctgtggcgaacgcctcattgttggatgagggtacagcggctggagaagctatgctcttgtcattcaatatttccagaaaaaagaaactaaaatacgtaatagataaaaaattacaccagcaaacaaagagtgtccttcacaccagagccaagccgttcaatattgaaattattgaagttgactgttcggatatcaagaaagctgtggatgttttaaagaaccccgacgtatctggttgtttggttcaatatccagcgacagatggttcaatcttaccgcctgactcgatgaaacagttatctgatgcgttacactctcacaagtctttgctctctgtggcctcagatttaatggctttgacacttctaaaaccacctgctcattacggtgctgatatcgtcctgggttcctctcaacgatttggtgtcccaatgggttatggtggtcctcatgctgcttttttcgctgttattgataaattaaacagaaaaattccaggtagaattgtcggtatctctaaagaccgcttaggcaagacggccttgcggttggccctccaaacaagagaacaacatatcaagcgtgataaggcaacttcaaatatatgtaccgctcaagctttactggctaatgttgcttcgagctactgtgtttatcacggtcctaagggcctacagaatatttccaggaggatatttagcttaacatcaatattggcaaatgccatcgaaaatgacagttgccctcacgaactaattaataaaacatggtttgatactttgactataaagttaggtaatggcatatcctccgagcagttattggacaaggccttgaaagaatttaatatcaatttgtttgccgtggacaccaccactatttccttggctcttgatgaaacaactacaaaagctgatgttgaaaatctactaaaagtgtttgacattgaaaattcttcgcagtttctttctgaggactattctaacagtttcccaagggaatttcagcgtactgatgaaatattgaggaacgaagtctttcacatgcaccatagcgaaacagcaatgttgagatatttacataggttgcaatctcgtgatttatctcttgctaattctatgattcctttaggttcctgtactatgaaattgaacagtactgttgaaatgatgccaatcacttggccccaattttcgaatatccatccgttccagccatcaaaccaagtccaaggatacaaggaactaattacttcgttggagaaagatttatgcagcattacaggtttcgatggtatttctttacaaccaaattcaggtgctcaaggtgaatatactggtctgagagtaatcagatcctacctggaaagcaaaggtgaaaatcatcgtaacgtgtgtttaatccctgtatccgctcatggtacaaatccggcttctgccgctatggcgggtttaaaagttgttcctgtcaactgtttgcaggatggctcattagatctggttgacttaaagaataaggctgaacaacattctaaagaactagccgccgtaatgatcacctatccttccacttacggtttatttgaaccaggcatccaacatgctattgatatcgtacattcttttggtggacaagtctatttggatggtgctaatatgaatgcgcaggttgggctaacttcacccggagatcttggtgcagatgtttgccacttgaatttacataagacattttccattcctcatggtggtggtggtccagctggagctcccatttgcgtcaaatctcatttaataccccatttacctaaacatgacgttgttgatatgatcactggaatcggcggtagcaaatccatcgattcggtctcctctgctccatatggtaatgctttagtgttaccaatttcttatgcctatatcaaaatgatgggtaatgagggattaccattttctagtgtgatagcaatgctaaattcaaattatatgatgacaagattaaaagatcattataaaattcttttcgtcaatgaaatgagcacactaaaacactgcgctcatgaatttatagttgatctaagagaatacaaagctaaaggtgttgaagctatcgatgttgccaagagattgcaagactacggattccatgccccaacgttggccttccctgttcccggaactttgatgatagaaccaacagaatcggaaaacttggaagaattggatagattctgtgatgccatgatatccatcaaagaagaaataaatgccttagtagcaggtcaaccaaaaggacagattttgaaaaatgcccctcattcattggaagatcttattacttcctccaattgggatacgagaggttatacccgtgaagaagccgcttacccattaccctttttgagatacaataaattctggcctactgtcgctagactggatgacacttatggtgacatgaatttaatatgtacatgcccttctgtagaagaaattgcgaacgaaactgaatgagtacatacccattatgttgtatatgtatattagttgacgcatttatgcacatatgtagataatataaaatattcaggtcaaagaa

SEQ ID NO: 2453 - DNA, 1311 bp, Saccharomyces cerevisiae
acaatagaagagcaccaacacgaaatatggctgtcggtggtaataactggagcatgtggctgcgaatgtcacgggtccacctcaggcagatcacgaagtctctggaccgaacgctgatcagtttgagccatgggaatttttcccaccaatataatcgcaatatttttgtcacttggtggaagagcctatttgaggcttctacagcttttaggagggcaagtggtttaacggtatctcctctcacgaggagaggaatcgcaaggtttgaccatttcagacctgttcccaatgtcagtaaatttgcttcttttcccagagtgcccaaaggagccccaaggggcctttttaccaactggaatatgactacatcaaagagattattagggcagagagcttattcgacttccagtatcaaatttacccaagaagccgtgaataacatgactatatctttgaggtgttttttcaactcactaggcggattaaatcagtgctcccactctaattcctgcaaagcttatcagaatgcgtctaatgttacctctaaacaggatcacgtccaaccagttgcccttaagaagttatctcaaaaggatatcaatttcattcgtaatttagaactatttaagataatgaagacccagaatgaagtcgttgatgaaacaagcgcatattacatggaaaaaccaggttcctatattgaatttaccatttcagaatttaacgttaatgggacattctccgcacctttgtcatttttagatccttctttgttagcggatttggatgaaatgattagaaattacaaatacgaattaaaatcaatatacagtagtgttgacatgatcttgcagaattatggatcattgccgataacttttcatcgaaataagattcgaatacattttccaaactcaactgtggtggaaacagaaaaactaattgcaggtctgaatattgctacgggtgttatttacgcagatacgtctcccgatatcagtctagaaggtacaaatttgaatgctctggttaatgttgacaattcaggaagcgtatggtcttttgttaaggagccctcgtttccctctaggagcgctttttcacctattttatcagatgcatcctatgatacttatgaattggtctagcaaagacgttgtttcatcgcgctattaccaagaaggttactttacttgttcttgcacatggacgcacgttgtgtgttcatatatatatatatatatatatatatatatttgtgcttgttttcattgtctctatagttaatacattctatttttatcgttatat

SEQ ID NO: 2454 - DNA, 402 bp, Saccharomyces cerevisiae
atgaccgttaagacaggaattgctattggtttaaacaaaggtaagaaggtcactagcatgaccccagctccaaaaatctcttacaagaaaggtgctgcttccaacagaaccaagttcgtaagatctttggtcagagaaatcgctggtttgtctccatacgaaagaagattgattgatctaataagaaactctggtgaaaagagagctagaaaggtcgccaagaagagattgggttctttcaccagagccaaggctaaggtcgaagaaatgaacaacatcattgctgcttctcgtcgtcactaagtttctaaaaactgatttttgtaatatatatatagatatcatattttctttttaacttaggaaaaaataacaccaaaaaaaaaaccaccaatactttca

SEQ ID NO: 2455 - DNA, 589 bp, Saccharomyces cerevisiae
tgttaatatatatagatagacaaactaatgacaaggagaattgaatttctcatataacacatacaataaaaccaagaaatgtcttcaaactatgccactcctttagacgatgaggtgtttcccttatcttttgccaattatcaatttaccgagcatgtgtcacttggtgagcattattcactcaatacttcggaagatgccaaatataataatttgaatggtcctttcgtggtaccgagagacaccgggaagttcgatttgaacacaagttctgcctcggacgagactgtgttctcgttagataaccctcaagaaaacaactacaaacaccaagccatgaataacgtccaggattgtcgcatggccgtcgcggccaaaactacccagtcgtgtgataaattgaccgatctttatgccaatgccgcccaacaaaactacagattgtggctgtcttcattttagaataacgattaaggaatgataatcaaaagaaaaaaacaatctacctacatatatatgcactcaacatacataaatacacacgcattattgtttctataaacttccaacagacaatattcccatacaa

SEQ ID NO: 2456 - DNA, 1932 bp, Saccharomyces cerevisiae
agttcttcgttcgctttaatttatttcctggttattgtcaatttattcatcccatctccccaggatagaagaaattagtgtaattttgctgacaatacattttaacgacgataacaataatagcaattaaataaaatagcactaccaccactccactgctcgttagctatttctgtaaaataaataaaaagatcatgaaccactcagaagtgaaaactgggttaattgtcactgcaaagcagacatattacccaattgaattgtccaatgcagaactactaactcattacgaaaccatacaggaatatcacgaggaaatctctcaaaatgtgctggtccaatcttccaagacaaaaccagacataaaattgatcgatcagcaaccggagatgaatcctcatcaaactagagaagccatagtaacatttttgtatcaactttcagtgatgactagagtaagtaatggtatcttcttccacgctgtcaggttctacgatcgctattgctctaagagagtagtgttaaaggaccaagctaaactagttgtaggcacctgcctttggttagcggccaaaacttggggagggtgcaaccatattataaacaacgtctccatccccacaggtggtaggttttatggtcccaatcctagagctcgtattccacgcctttctgaattggttcattattgcggcgggtccgatttattcgatgaatcaatgttcattcaaatggaaagacatatcttggatactctgaactgggacgtttatgagcccatgattaatgactacattttaaacgttgacgaaaattgtttgatacaatatgaactttacaaaaaccagttacaaaataacaatagcaacggcaaagaatggtcctgtaagagaaagtcacaatcttctgacgacagtgatgccacagtggaagaacatatcagtagttcaccgcaaagtactggactagatggcgatacaactaccatggatgaagatgaagaactaaattccaaaattaaattgataaatttgaaaagattcttaattgatctgagctgttggcaatacaacttgcttaaattcgaattatacgaaatatgcaatggtatgttttctataataaacaaattcactaatcaagatcaaggcccttttctctctatgcccattggtaatgatataaactcaaacactcaaacgcaggtattcagcattatcatcaatggcatagtcaattctcccccatctttagtcgaagtttataaggagcaatatggtatagtacctttcatattacaagtaaaagattataacttggaattacaaaagaaactgcaactggcctctacaatagacctaaccagaaaaattgctgtcaattctcgttactttgaccaaaatgcctcttcatcatcagtttcttctccaagcacatattcttcgggaaccaattatactccaatgcgaaacttcagtgcacaatcagacaacagtgttttcagtactaccaacattgaccattcatcgccgatcacccctcacatgtacacttttaatcagtttaaaaacgaaagtgcttgtgacagtgccataagcgtaagcagtctacctaatcaaacccaaaatggtaacatgccattatcaagcaattatcagaatatgatgctagaagaaaggaataaagagaatagaattcccaactcatcatccgctgaaataccacaacgtgccaaatttatgacgactggtatattccagaacacaggagaacttactaatagagcgtcttcgatatcgctatcgttaaggaaccacaatagctctcaactgtgaccattttctcatcaagcctacatatatacttaattaataacggaatactacgcttttccatcgtaagtaataatgacattcatacttgacattttaa

SEQ ID NO: 2457 - DNA, 1224 bp, Saccharomyces cerevisiae
tctcatctttttcgagaacctaccggcatattaaactgaagtaagacatcattctgaggaaaggatcggtattataaccattattatttgttgcactttattactatgtggtcgaaaaagtttacattaaaaaagctaatcttaggcgggtatttgtttgctcaaaaggtctattgtgaagacgaaagtaactctatatacggtacctggtcatctaaatcaaatcaagtgttcacgggaccggggttttatgatcccgtagatgaactattgatagaaccttcattgcccgggcttagctattcgttcactgaagatggttggtacgaagaagctacttaccaggtaagtggcaatcctcgtaacccaacttgccccatggcttcgttgatttatcagcatggtacatataacatttcagaaaacggtacgttagttctgaatcctattgaagttgacggtagacaactattcagcgacccatgcaatgatgacggagtttcgacttattctagatataaccaaacagaaactttcaaggaatatgccgtaggtatagatccttaccatggtatttacaccctgcaattgtaccaatatgatggtactccaatgcaaccactatatttggcttatagaccaccaatgatgcttccaacagaaactttgaacccaacatcgtcagcgaccagcactgacgacccatcctctaataagaaaagatcactgagaagtttagtgaggaggagcctggaaaacagacacaagacgaatgccattaaaagacaaaatacctcatttttaacctccaatgccatttggtatatttctgcgggtatgctaggtgtaggttcattattatttttagcattttaggcgcactacagggatacttattcaaccaatgggggaaagaggccccatgtggccttcaaataaatattaaaaactataaacatataaggcaaaacaactttatcaggcgagaaagagaagcaagaataggtgtaattttatgcacccaaggaattgattgtaatcatattattaaataaggtggatgaataaaagattttcaaaccagtttttccgagatagttaattatgtacgagtgacaaatgggatatcaatcaatgaacacaatcaaaacaccttattatgactttcttgttatattcttatatacataaccaacatttaaatgtcaatttcttcagtttcta

SEQ ID NO: 2458 - DNA, 768 bp, Saccharomyces cerevisiae
caatcaaactaagactagcccagaccattatagccatgaagtttttcccactccttttgttgattggtgttgtaggctacattatgaacgtattgttcactacctggttgccaaccaattacatgttcgatccaaaaactttgaacgaaatatgtaactcggtgattagcaaacacaacgcagcagaaggtttatccactgaagacctgttacaggatgtcagagacgcacttgcctctcattacggggacgaatacatcaacaggtacgtcaaagaagaatgggtcttcaacaatgctggtggtgcgatgggccaaatgatcatcctacacgcttccgtatccgagtacttaattctattcggaaccgctgttggtactgaagggcacacaggtgttcactttgctgacgactattttaccatcttacatggtacgcaaatcgcagcattgccatatgccactgaagccgaagtttacactcctggtatgactcatcacttgaagaagggatacgccaagcaatacagcatgccaggtggttcctttgcccttgaattggctcaaggctggattccatgtatgttgccattcgggtttttggacactttctccagtactcttgatttatacactctatatagaactgtctacctgactgccagggacatgggtaagaacttgttgcaaaacaaaaagttctaagctgcccgacctcacgaaatcagtcatgcggtagtccattataatataactattattattatta

SEQ ID NO: 2459 - DNA, 1440 bp, Saccharomyces cerevisiae
ggccttttaaccatcgtgcaaaacaataaaagactaccaataaccgacgtgaatcatgtctgcaccaactccattagcagaggcctctcaaattcccactatcccggccctttctcctttgactgcgaagcaatccaaggggaatttcttctcctcaaacccaatatctagctttgttgtggatacgtacaaacaattgcattctcacagacaatctttggagctggtcaatcccggtaccgtggaaaacctgaataaggaagtctcccgtgacgtgtttttgtctcagtattttttcaccgggctaagagctgatttgaataaggcattttccatgaatcctgcttttcaaacctcacacactttctctataggttcccaagcattgcctaagtacgcattctccgcattgtttgccaacgataacctatttgctcaaggtaatatcgacaacgatttatctgtttccggtagattaaactatggttgggataagaaaaacatttctaaggtcaacctacagatatcagatggccaaccaacaatgtgtcagttagaacaagactatcaggcttccgatttttctgtgaacgtaaagacattgaacccttcgttctctgagaagggcgaattcacaggtgttgctgttgcatcttttctacaaagtgttactcctcaattagctttaggtttagaaactttatactccagaactgacggtagcgctccaggtgatgctggtgtttcatacttgactcgttatgtctccaagaagcaagattggattttttcgggccaattgcaagccaacggtgctttaattgcatcgctatggagaaaagtagcacaaaatgtcgaggcaggtatcgaaactacattacaagctggtatggttcctattactgatccattgatgggcactccaattggtattcaacctactgtcgagggttctaccactattggtgctaagtatgaatacagacaatctgtatatcgtggtacattagattccaatggtaaggttgcatgttttctagaaagaaaagttctgccaactctgtccgttttattttgcggtgaaatcgatcatttcaagaacgataccaagattggttgcggtctacaatttgaaactgctggtaatcaagaattactaatgttacaacaaggtttagacgcagatggtaacccattgcaagctcttcctcaattgtgaaaatcttcccttggcttttttatggttgaataaataatcattgtttttatctttcctatgctttttttttattaatttgtgtaacgacttctccctccagcatacgctcccagacttttttgtttttgttttaatataaataattatgtatatacgtgggcaccaagttgagggggaattccttgtttatagttatgatacgtctcatatccttgtcctta

SEQ ID NO: 2460 - DNA, 1440 bp, Saccharomyces cerevisiae
acgtatagaaaactgtcaatatgtcattaccgttcttaacttctgcaccgggaaaggttattatttttggtgaacactctgctgtgtacaacaagcctgccgtcgctgctagtgtgtctgcgttgagaacctacctgctaataagcgagtcatctgcaccagatactattgaattggacttcccggacattagctttaatcataagtggtccatcaatgatttcaatgccatcaccgaggatcaagtaaactcccaaaaattggccaaggctcaacaagccaccgatggcttgtctcaggaactcgttagtcttttggatccgttgttagctcaactatccgaatccttccactaccatgcagcgttttgtttcctgtatatgtttgtttgcctatgcccccatgccaagaatattaagttttctttaaagtctactttacccatcggtgctgggttgggctcaagcgcctctatttctgtatcactggccttagctatggcctacttgggggggttaataggatctaatgacttggaaaagctgtcagaaaacgataagcatatagtgaatcaatgggccttcataggtgaaaagtgtattcacggtaccccttcaggaatagataacgctgtggccacttatggtaatgccctgctatttgaaaaagactcacataatggaacaataaacacaaacaattttaagttcttagatgatttcccagccattccaatgatcctaacctatactagaattccaaggtctacaaaagatcttgttgctcgcgttcgtgtgttggtcaccgagaaatttcctgaagttatgaagccaattctagatgccatgggtgaatgtgccctacaaggcttagagatcatgactaagttaagtaaatgtaaaggcaccgatgacgaggctgtagaaactaataatgaactgtatgaacaactattggaattgataagaataaatcatggactgcttgtctcaatcggtgtttctcatcctggattagaacttattaaaaatctgagcgatgatttgagaattggctccacaaaacttaccggtgctggtggcggcggttgctctttgactttgttacgaagagacattactcaagagcaaattgacagcttcaaaaagaaattgcaagatgattttagttacgagacatttgaaacagacttgggtgggactggctgctgtttgttaagcgcaaaaaatttgaataaagatcttaaaatcaaatccctagtattccaattatttgaaaataaaactaccacaaagcaacaaattgacgatctattattgccaggaaacacgaatttaccatggacttcataagctaatttgcgataggcattatttattagttgtttttaatcttaactgtgtatgaagttttatgtaataaagatagaaagagaaacaa

SEQ ID NO: 2461 - DNA, 1333 bp, Saccharomyces cerevisiae
gcgaaaagatcgaggacaatgattccaaaattatatatacatttgatactatctttattgttgttgccgctaattttggcgcaggattattatgcaatactagagatagacaaagatgccactgagaaggaaatcaaatcagcgtacagacaattgtctaagaagtaccatccggataaaaatgctgggagcgaagaagcccatcaaaaattcattgaagtcggcgaggcatacgatgtattgagcgatcctgaaaagaaaaagatttatgaccagtttggtgcagatgctgtaaagaatggcggtggcggtggcggtccaggaggccctggcgcaggtggattccacgatccgtttgacatattcgaacggatgtttcaaggaggtcatggaggtcctggcggcggatttggccagagacagaggcagcgtggtccaatgatcaaggtccaggaaaaactatctttaaagcagttttattccgggtcctcgatagaatttactttaaacctaaacgatgaatgtgatgcatgccatggtagtggctctgcagatggtaagctggcccaatgtcccgattgtcaaggtcgtggggttataatacaagtgctgcgcatgggtattatgacgcagcagattcaacagatgtgtggtaggtgtggtggtacgggacaaattatcaaaaatgaatgcaaaacatgtcacggcaaaaaagttaccaaaaagaacaagttcttccacgttgacgttccaccaggcgcaccaagaaactacatggacacaagagtcggcgaggctgaaaaagggcctgactttgacgccggtgacttggtcatagaattcaaggaaaaggatactgagaacatgggttacagaagaagaggcgacaatctgtacagaacagaagttctttctgctgcggaagcgctatacggcggatggcaaagaacgatagaattccttgatgagaacaagcccgttaagttatctagacccgctcatgtagttgtctccaatggcgaagttgaagtcgtgaagggattcggcatgcccaagggtagcaagggttacggtgatttgtacatagactacgtcgttgtcatgccaaagactttcaaatctgggcaaaatatgctcaaagatgagttgtagacagataatcctacgtacgcacacatgcatatatagatagacaactggtcttctgcatccggtaataggcattggctttaatactaataaaagcaagaaaaaagcgacaccagtaaatttcagacatcttcgagaatttttttcgcgcgctttctatcaaaaaaaaatgaaaaataaataa

SEQ ID NO: 2462 - DNA, 1724 bp, Saccharomyces cerevisiae
tcaaagtcgtttagctagcgatgcaactatctaaaagtatactactggcagcattagctgctacaccatctctggtgaatgccatgctccccatccatatcaagaattataggttcattaagccatcctctgccacaaatagcgaatccgataacgaagttttttttgtgaaaggtgtcgattatcagcctggtgggtcgtctggttacgatgctgactctgatacagatattctttctgaccctgaagtgtgtgccagagacgcctacgctttccaacaacttggtgtcaacacagtgagaatttactccctgaaccctgacctaaatcatgacaagtgcatgactatcttcaacaatgctggtatctacgccattttggatgttaatagtggtaattacggggagagtttgaaccgtgctgacccatctggaacatatgactctttgtatttgtcaagagtcttcaaatttattgacgctttcaagaactaccctaacgtgctaggattcttttctggcaacgaagtcataaatgatcaaagcgactatgcaaaaattgatcctccatacatccgcgctgttcaaagagatatgaaacagtatatttcaaaacatgcgaacagaagcatcccagtcggatattctgctgctgacaatactgatttgaggttagcaaccttcaagtacttgcagtgtaattcgttggatggaaacaaagtcaatgatgatttggacatatctaaatctgatttctttggcctaaatacttatgaatggtgctctggcacttctagttgggaatcttctggctatgacaagttaaactcaactttcgaagatgctgttattccgttgatattttctgagtatggttgcaacaaaaatacaccaagaacttttgacgaagtctctgagggtttgtatggtggtttaaagaacgtcttctctggtgggttggtatacgaatacactgaagaagctaataattacggtttggttaagcttgatgatagcggttctttaacttataaggatgattttgttaatttagaatcacaattgaagaacgtttcattgccaacaacaaaagaaagcgaaatatcttctgactctatctacaagtgcgataacagtgccatcaccaatatttattctggctttggaacgaacaatttcactttgccttctcaaccagcagaaattgccaatatgattgaatacggtgttaatggcaccaacaccggtaagatattgactgattatgctgttccaactacttttaactatacaattaaaaacaataaagatgataccatttcagctactatttcatacgacaaagctaactcactgaacgaactagacgtcacagccacaacggtcgcaaagtcagcttccacatcacaatcatcttctcgctccttaacttcaagcaccagtccatcttcaagcactggctcatcttcaagcaccggttcatcttcagcttcaagcagctccaaaagtaaaggcgtcggaaatattgttaatgtttcctttagtcagtctggataccttgcattatttgcaggtctgatttctgctctactctgagctgctcatgtatttttttgaaacatccatggacttgttttcgttttcaaccgttttatttttttgtgttcttttatcttaacatatgtaaaacaatttatatgtttttaaatagtaaacttttcatca

SEQ ID NO: 2463 - DNA, 1704 bp, Saccharomyces cerevisiae
atatctatattctaaaataaactaacgacatcaatattcacaatggctgccggtgaacaagtttctaacatgtttgacactatcttagtgttagactttggttctcaatactctcatttgattaccagaagattaagagagtttaacatctatgctgagatgttgccatgcactcagaagatctctgagttgggctggactccaaagggtgtcattctttctggtggtccatattccgtatacgctgaagacgctccacacgtagaccatgctatctttgatttgaacgttccaatcctgggtatctgttacggtatgcaagaattggcttggattaatggtaaacaagttggtcgtggtgacaagagagagtacggtcctgccactttgaaggtgattgacgattccaactctctattcaaaggtatgaacgactctactgtctggatgtctcacggtgataaattgcacggcttgccaactggttacaagaccattgccacctccgataactccccatactgtggtattgtccacgaaactaagccaatctatggtattcaattccacccagaagttacacattctacccaaggtaagactcttttgaaaaacttcgccgttgatttgtgtcacgctaagcaaaactggactatggaaaactttatcgacactgaaataaacagaatcagaaaactggtcggtccaactgctgaagtcattggtgctgtttccggtggtgttgattctactgttgcatccaaattgatgacagaagccatcggtgatagattccatgccatcttggtcgataacggtgttttgagattaaatgaagctgctaacgttaaaaagacccttgtcgaaggtttaggtatcaacttgatggttgtcgatgcttccgaagaatttttaagtaaattgaagggtgtcactgacccagaaaagaagagaaagattattggtaacacatttatccacgtctttgaaagagaagctgaaaaaattaagccaaaagatggtaaggagattcaattcctgttacaaggtactctttatccagatgtcatcgaatccatttctttcaaaggtccttctcaaaccattaaaactcatcacaacgtcggtggtttactagagaacatgaaattaaagctaattgaaccattgagagaactgttcaaagacgaagtcaggcatctaggtgaattattaggaatccctcatgatctagtctggagacaccctttccctggtccaggtattgctattcgtgttctaggtgaagttactaaggaacaagtcgaaatagcaagaaaagctgacaacatttacattgaagaaatcaagaaggccggcttatacaaccaaatttcccaagcctttgcctgtttgttgcccgttaaatccgttggtgttatgggtgaccaaagaacctatgatcaagttattgctttgagggccattgaaactactgatttcatgactgctgactggttcccattcgaacacagtttcttgaagaaagtcgcctcaagaattgtcaatgaagtcgatggggttgctagggtcacttacgatataacttccaaacctcctgcaactgttgaatgggaatgattcatttctattttaacattttctatatatatatatatataagcctagtacaaatataattcatcaacgttcaaatatttttaa

SEQ ID NO: 2464 - DNA, 1519 bp, Saccharomyces cerevisiae
agaaagattatataaagaatggaaaaacaaaaaaggtgaaaaaacatcttggaaggcctcataataaatcaatcggctgcctcgagaaatgtcagagttgagagccttcagtgccccagggaaagcgttactagctggtggatatttagttttagatacaaaatatgaagcatttgtagtcggattatcggcaagaatgcatgctgtagcccatccttacggttcattgcaagggtctgataagtttgaagtgcgtgtgaaaagtaaacaatttaaagatggggagtggctgtaccatataagtcctaaaagtggcttcattcctgtttcgataggcggatctaagaaccctttcattgaaaaagttatcgctaacgtatttagctactttaaacctaacatggacgactactgcaatagaaacttgttcgttattgatattttctctgatgatgcctaccattctcaggaggatagcgttaccgaacatcgtggcaacagaagattgagttttcattcgcacagaattgaagaagttcccaaaacagggctgggctcctcggcaggtttagtcacagttttaactacagctttggcctccttttttgtatcggacctggaaaataatgtagacaaatatagagaagttattcataatttagcacaagttgctcattgtcaagctcagggtaaaattggaagcgggtttgatgtagcggcggcagcatatggatctatcagatatagaagattcccacccgcattaatctctaatttgccagatattggaagtgctacttacggcagtaaactggcgcatttggttgatgaagaagactggaatattacgattaaaagtaaccatttaccttcgggattaactttatggatgggcgatattaagaatggttcagaaacagtaaaactggtccagaaggtaaaaaattggtatgattcgcatatgccagaaagcttgaaaatatatacagaactcgatcatgcaaattctagatttatggatggactatctaaactagatcgcttacacgagactcatgacgattacagcgatcagatatttgagtctcttgagaggaatgactgtacctgtcaaaagtatcctgaaatcacagaagttagagatgcagttgccacaattagacgttcctttagaaaaataactaaagaatctggtgccgatatcgaacctcccgtacaaactagcttattggatgattgccagaccttaaaaggagttcttacttgcttaatacctggtgctggtggttatgacgccattgcagtgattactaagcaagatgttgatcttagggctcaaaccgctaatgacaaaagattttctaaggttcaatggctggatgtaactcaggctgactggggtgttaggaaagaaaaagatccggaaacttatcttgataaataacttaaggtagataatagtggtccatgtgacatctttataaatgtgaagtttgaagtgacagcgcttaacatctaa

SEQ ID NO: 2465 - DNA, 1899 bp, Saccharomyces cerevisiae
tcctacttgaaaccctgctttttttatttgttattaataattatgagcatttgtccacatatacagcaagtatttcagaatgaaaagtctaaagatggggttctaaaaacgtgcaatgctgccaggtatatattaaatcattccgtacccaaggaaaaattcttaaacaccatgaaatgtggtacatgccacgaaataaactctggtgcaactttcatgtgtctacaatgtggattttgtggatgttggaaccattcgcattttctctctcacagtaaacagattggtcacatatttggtatcaactcaaataatggccttttattttgcttcaaatgtgaggactatatagggaatatcgatctgattaacgatgctatcctagcgaagtattgggacgacgtgtgcacaaagaccatggttcctagcatggaaagaagagatgggctttctggcctgatcaacatgggatccacttgtttcatgagtagtattctccaatgtctaatccataacccttactttattaggcactcaatgagtcaaattcattctaataattgtaaagtgcgttctccagataaatgtttttcatgtgcactcgataaaattgttcatgaactttatggagcgctgaatacaaagcaagcttcttcgtcatctacatctactaatcggcaaaccggattcatatatcttttaacttgtgcctggaaaatcaatcaaaatctagcagggtattcacaacaagatgctcatgaattttggcagtttataattaaccaaatccaccaaagctatgttcttgatttgccaaatgccaaggaagtcagcagagcaaataataagcagtgtgaatgcatagtgcatactgtgtttgagggctccttggaaagttctattgtgtgtccaggctgtcaaaataattcaaagacaaccattgatccattcttggatctttctctggatatcaaggataagaaaaaactttatgaatgtcttgacagtttccataaaaaagaacagttgaaggatttcaactatcattgtggggagtgtaacagcactcaagatgcaataaagcaactaggcatacacaaattaccatcggttttggttttgcaattgaaaagattcgaacacctacttaatggaagtaacagaaaactagacgattttattgaatttccaacttatttaaatatgaaaaattactgttcaacgaaggaaaaagataagcattctgaaaatggcaaggttccagacattatttacgaattaatcggtattgtttcccacaaggggacggttaatgagggacattatattgcattttgtaaaatttctggagggcaatggtttaaattcaatgattccatggtctcctctatatctcaagaagaggttttaaaggaacaggcatatttattattctacaccattcgtcaagtaaattgattcagcaaatagcattcaacaataataataaaacaaaaaagaagaaaaagctatgcatattcctatcacagttaacgcttgcttccgttcttttttctatatcatcgtttccatcatgtttttctttaaattgaatactttcctatgctcttaatgagttgcgattgtgcatatactgtatttcaaaatcctttgtatctaactaaggaagaaaattactatgacgtttattcaggatttttttttttcattccttgctatacgaacaaaagagcaaaggctggaaaactaagtgagtttatatatagtaataattaaagaacatatcattatcatgaatttagaatgcaaatttgctcctctcaaaatggcataccttgttgttcgcgaaggcaagcccttggttataaataggatataatataatatagggatcaagta

SEQ ID NO: 2466 - DNA, 444 bp, Saccharomyces cerevisiae
agaaaacacagatcataactaaccgttcaagatgttgatgccaaagcaagaaagaaacaaaattcaccaatacttgtttcaagaaggtgttgtcgtcgctaagaaggatttcaaccaagctaagcacgaagaaattgataccaagaacttgtatgttatcaaggctttgcaatccttgacttctaagggttacgttaagactcaattctcatggcaatactactattacactttgactgaagaaggtgttgaatacttgagagaatacttgaacttgcctgaacacattgtcccaggtacctacattcaagaaagaaacccatcccaaagacctcaaagaagatactaagtgcgttgttacgtttaagtaaactattttctatttaatattagactattctttattttgttctctctcgtaatatatgtggttttatgcatcaa

SEQ ID NO: 2467 - DNA, 607 bp, Saccharomyces cerevisiae
gacttcacagaccattatgaacggcggaggcaagaatgttttgaataaaaactcagtgggctcagtatcagaagttggtccggactcaacacaagaggaaacgccacgagatgtccgtcttttgcatctgctcctcgcatcacagtcgattcatcaatatgaggaccaagtaccgctacaattgatggattttgcacataggtacacacaaggagtccttaaggacgcgttggtttacaacgactacgctggcagtggaaattctgccggcagtggattaggagtagaagacatacggcttgccattgcagcgagaacacaataccaatttaagcctacggcacctaaggagctcatgttacagttagctgcggaaagaaacaagaaggcattacctcaagtgatgggtacgtggggtgtcaggcttcccccagaaaaatattgtctcacagcgaaggagtgggaccttgaggacccaaagtctatgtgaatgcaccgcttatatatcataagtacactaaatcaagttcttccggaagatgcgtcatgtagaatgcataatagagtaatatacactaaataatgcgctagtcgtgtatcgtgatca

SEQ ID NO: 2468 - DNA, 2392 bp, Saccharomyces cerevisiae
attgatttttagaacgtgaaaaggataaactgaaaacttgaagtcctaaccatgttgtctcaaacctccataccggaagtgaaagaagacgtgataggctatgcgctacaccagaggagagccagagtgggacaattccaagacttgggtccgcctgatttaattactttgatcaaatcgttaccttcatcctcgagcacaacaactgctactgcctccgccaacgataacggagcaacttcaaacatcaatggacaagatcctacgaccatagttacggagttacattcccatgacaaattaaaggggcagatcggcactttcttttactgtatgggtatcgatacttcggatccaacttctattacaatctttgccaaaaagataaccgatcttttcttagacacgccccaaatttggtttggtaagaagaagcactttcacgtatcgaagatttctatcagttcttggaatgcgtttaggaaatatgatgttaacattatagttcacattccaggaactgtgcaaacctacattataaatagcgacggtgaacaatcgcaacttccctccgtggcagaagcgtcatctggccgcaactcacaggatttaaacgtcaacatgatttgggcggaaacgtttatgagtggtattgtacgtgacattatgattatgaaagataatcgtgcggatggagaatcccagaatttggtagaaacactaattttcaatccatttacctcgggtgagttggaagatgttgccaataactttattaaactgttccccttggtctatgaaaaaggtgtttatttagatgcacctactcacgttttaaatccctcgttaaccaataattatttagtggaaactttagtggaaatagttaggttaactaagagtttggaagcatgtcgtaaaatgctcaagaagttaatagaaattcatccagaagcagtaataatattaattcgtgtttattttgcgtgcgatttagagatagatgcagttgacctgatcaacgagcaactaaattccccctcttcgttcttagccgacgattcaaagactagccatatccagctaatcttcaaatccgaattattaagtattcaaagtgaattcttactggatgtcaagagagattacaagcttgctaaggaagtagccatggaggctgttaactgtgcaccaaacgaatttaaaacttggtatttattgactagaatatacattaaactaaacgatatgtcaaatgccttgctatcgttaaacgcctgccccatgtcacaggttaaggaaaaatacgttcttagaagaattgcgcctattacttcagatgaaaatcttcatctgccattaccattggatgcctcaattgaggagatttcgtcattgaaccccatggatgtccagttggagcaaaagtccgcagatccaaacctagtcaatctctctgcgtcaagtttaaagtctactttccaactagcctataaattattgacagaaattgtccaaataacaggatgggagcagctgttgaaatatagatcaaaaattttcgttatggaagacgagtaccaaggctccacttcttccattgatgaagcagaagttcgcggtaatgatatatccaaaatgagatcaaagaggctatgcgaaagatggttggataatctcttcatgttactatacgaagatttgaaaacttacaccgattggcaatcagagcaattgtattttgatgctcaaaacagtaaatatcacaaattaactgttgaatgggaattattcggcctttgtgcgaaaagactgggacatcttccagaagctgcgaaggctttccaaattgggctttcccaaagattttctccagtatgcgcaaagaatctattacagttttacattgacgagcataagcgtattaggagggattcagtctcagcaaactccgagttaacctcttctcaaatattgtcaagtatcaatgacatcgacagctcaatcatcgatctagtagtcaagatttgttgctggaatcatcgttggtacatcgagttctcaataatattaatagatgctctgagtgttgcagtacaagatatgggcattactaaagtacataatgaaattgcctctagattttctgacccagtagcccaattgattgacgataacattctaaattttctgaagaatttcacgaatgacactttcgataattagaaaaagatgaatacaatcaataaaaaggtgaaagaaatcaattaacaagaaacgggttatgtattttatgtatgatatcctggcattgtcatgtataggtcaccttcttggggaatttcccattttcaagttattctgcctctaatgcgataaccgtaatcttaaa

SEQ ID NO: 2469 - DNA, 1596 bp, Saccharomyces cerevisiae
ctcaaatatctaattaagtaattgactgtgtacattgtcctttatctcattttgaatcacctttattaatttttggttgttatataggacgaacaaattagaacgaaatcatatccagaacgcagatatgatcgtcaatattagtgcgaagatgatcttatcgatatgctttacgtttctgtcattttttaaagccactcatgccatggatttggatactactagcaaaacgtcaatttgtgatgcgacagcgttaattcaaggtggtatgctggattactatgagggtactagatacggtggtaccgttgggatgtttcagtcaccatactattggtggcatgcaggggaagcatttggtggcatgttggaaaattggtttctttgtgagaatgatacatatcaagaattactatacgatgcactattagcgcaaactggttccaattacgattatatcccgtccaaccaaacgatggttgaggggaatgatgaccaaggtatttggggtattactgttatgggtgctgtcgagagaaattttacagaccccggtgacggcaagccaggttggttggcaatggtacaagctgttttcaacaccatgtactcaagatgggattcagagcactgtggcggtggtctgagatggcaaattttcacttggaatagtggttataattataaaaatacagtttcaaatgcatgtttgttccagattgcggcgaggttgggcagatatactggtaacactacatatttggaggttgctgaacaggttttcgactggctagtggatgtcgggtatgtggttcttaacgatactgcaaatgtctttgatggtgctgaaattgatacaaattgcactgatattacaaaaattgaatggacttataatcacggtatcgtgcttggtggtcttgcatacatgtataatgctacaaatggaacaggtgaatgggagaccagtttgacaaaaattctaaatggtgctaaatcttatttcttcaaagatagtattatgtacgaaagcgcttgtcaagactatggcacctgtaacaccgatcaaagaacattcaaaagtattttttctcgtatgcttggtcttacaagtgtcatggctccctttactagggacacaattgatgatttgataaaaacaagtgctgaggccgctgcaaaatcatgtaatggtggtacagatgggcatacatgtggtttaaattggcagaaacaaaccaatgatggctactatggattaggtgagcaaatgagtgctctagaagttattcaaaatcttttaattcatgacaggccagctccatataaggaagataatggcggtacgtcaaaaggtgacgcgaatgccggtatgaactcatcgaccactaacgtgctacaaaacaatttaaacattaagaaaggtgatcgcgctggtgccgctatcatcacagcagtcatactgagtgtgctaactggtggggctgtgtggatgctgttttaaatgtgtcaaactaggctcaaaaaaattttattgtattctaatatttaggctatccttttctttcagtaaaaatgtttatgtgctacatacaa

SEQ ID NO: 2470 - DNA, 1125 bp, Saccharomyces cerevisiae
cacctcaagtcattgtttcaactcgcttacggtatatatatctactttcattgagatataaacagcgctgatacaatctttttatataagtcttttgtacaaataaagctaggaaaagcccgacgtcattatagctatgccatctaccactaatactgctgcagcaaacgtaatagaaaaaaagccagtctcgttttctaatatcctattgggtgcctgtttaaacttgtcagaggtgactacattagggcaacctttggaggttgttaagaccacaatggctgcaaacagaaacttcacatttttagaatctgttaagcatgtctggtcaagaggtggtatcttgggttactaccaaggtttgattccatgggcatggatcgaagcctccactaaaggtgctgtgttgctgttcgtgtcagctgaggctgagtatcgtttcaaaagtttggggttgaacaactttgcctcaggtatattaggtggtgtcacgggtggtgtcactcaagcctacttaaccatggggttctgtacctgtatgaaaacggtggaaattacaagacataaatctgcctccgcaggtggtgtcccacaatcttcttggagtgtgttcaagaatatttataaaaaggaaggtattagaggtattaataagggtgttaatgctgttgctattagacaaatgaccaactggggttctcgttttggtttgtccagactagtggaagatggtatcagaaagatcaccgggaaaaccaataaagacgacaagttgaatccgttcgagaaaattggtgccagtgctttaggtggtggtttaagtgcttggaatcaaccaatcgaagtcattagagttgaaatgcaatctaagaaggaagatccaaacagaccaaaaaatttgactgttggtaagacatttaaatacatctatcaatcaaatggtctaaagggtctttaccgtggtgtcaccccaagaattggtttaggtatctggcaaactgtcttcatggttggttttggtgatatggcgaaggaatttgtcgccagaatgactggtgaaaccccagttgccaaacattagcgtgtattgtactataagttttttttaaaaaaattaattattta

SEQ ID NO: 2471 - DNA, 2486 bp, Saccharomyces cerevisiae
taagaacattcgcggcgccgctttaccccaacaaaaacagcccatcttttgttctacctctttcagataaggctcaacagatagacaataactgatcattctttcttttgtttgcaacccctctgagttgacataaaagcgagaatacaaaagaaccagcattagtaacacatcatttttttctctgttcttcactatttcttgaaaaactaagaagtacgcatcaaaatgaccgaacaatattccgttgcagttggcgaagccgccaatgagcatgaaaccgctccaagaagaaatatcagggttaaagaccagcctttgattagacccataaactcctcagcatctacactgtacgaattcgccctggaatgttttaccaagggtggtaagagagacggtatggcatggagagatattatagatatacatgagacgaaaaaaaccatagtcaagagggtggatggtaaggataagcccatcgaaaaaacatggttgtactacgaactgactccctacataaccatgacatacgaggagatgatctgcgtaatgcacgacattggacgtgggctgataaagattggtgttaaacctaacggtgagaacaagttccacatctttgcctctacttctcacaagtggatgaaaacttttcttggttgcatgtcacaaggtattcctgtggtcaccgcgtacgacactttgggtgagagcggtttgattcactccatggtggaaacagattccgtcgccattttcacggacaaccagctgttgtccaaattagcagttcctttgaaaaccgccaagaacgtaaaattcgtcattcacaacgaacccatcgatccaagtgacaaaagacaaaatggtaagctttacaaggctgccaaggatgctgttgacaaaatcaaggaagttagaccggacataaaaatctacagtttcgatgaaattattgagataggtaaaaaggccaaggacgaggttgaattgcatttccccaagcctgaagatccagcttgtatcatgtacacttctggttccactggtacaccaaagggtgtggtattgacacattacaacattgtagctggtattggtggtgtgggccataacgttatcggatggattggcccaacagaccgtattatcgcattcttgccattggctcatatttttgaattaacctttgaattcgaagcgttctactggaatggtatcctagggtacgccaatgtcaagactttaaccccaacttctacacgtaattgccaaggtgacctgatggagtttaaacctaccgtaatggtgggtgtcgccgcagtttgggaaacagtgagaaaaggtatcctggccaagatcaacgaattgcccggttggtctcaaacgcttttctggactgtctatgctttgaaagagagaaatataccatgtagcggcttgctgagtgggttgatcttcaagagaatcagagaagcaaccggtggaaacttaaggtttattctgaacggtgggtctgcaatcagcatagacgcccaaaaattcctctccaaccttctatgtcctatgctcattggatatgggctaactgagggtgtggctaatgcctgtgtcctggagcctgaacattttgattacggtattgctggtgaccttgtcggaactattacagctaaattggtggatgtcgaagatttgggctattttgccaagaataatcaaggtgaattgctgtttaagggtgcacccatctgttctgaatactataagaatcctgaagaaactgctgcggcctttaccgatgatggctggttccgtaccggtgatatcgctgaatggacccccaagggacaagttaagatcattgatagaaagaaaaatttggttaagaccttaaatggtgagtacattgcattggaaaaattagaatccatttacagatcaaatccttacgtccaaaacatctgtgtctacgctgatgaaaacaaagttaagcctgtcggtattgtggtccctaacttaggacacttgtctaagctggctatcgaattaggtataatggtaccaggtgaagatgtcgaaagctatatccatgaaaagaagctacaggatgccgtttgcaaagatatgctgtcaactgccaaatctcaaggcttgaatggtattgaattattatgtggcattgttttctttgaagaagaatggactccagaaaatggccttgttacatccgcccaaaaattaaagagaagagatattctagcggctgtcaagccagatgtggaaagagtttataaagaaaacacttaaaggaagacatagttttttactttcccccctgcccttcataaacactacgtttcattttctaagagcatcaatttgcaaacacctgaactacttgcacaatacatagtttcttctcctacagatacagttaataattaataaataacattacacataaacatgtttaagtttca

SEQ ID NO: 2472 - DNA, 1902 bp, Saccharomyces cerevisiae
gtcgctcttaacaatccaggctgaacaaaacaaggaataatgttacacaggcacggttctaagcagaagaacttcgagaatatcgctggaaaagttgtccacgaccttgcaggtctgcaattgctttctaacgacgttcaaaaatccgctgtccaaagtggtcatcaaggatcgaacaatatgagagatacttcgtctcagggcatggctaataagtattcagttccaaaaaagggactacctgctgatttgtcttaccaactgattcataatgaattaacacttgatggtaatccgcatttgaaccttgccagtttcgtgaacacttttaccactgatcaggcaaggaaattgattgatgaaaatttgaccaaaaatcttgctgacaatgatgaatatccgcaattaattgagctaactcagcgttgtatttctatgctagctcaattatggcacgctaatcccgatgaagaaccaataggctgtgccaccacaggttctagtgaggcaatcatgttgggtggactcgccatgaaaaaaagatgggaacacagaatgaagaatgctggtaaagatgcttccaagccgaacattataatgtcttctgcgtgccaagtggcattagagaagtttacgagatattttgaagtggaatgccgattggttccggtatcccacagaagccatcatatgcttgacccagagtcgttatgggattatgtagatgagaacactattggctgttttgtaattttaggaaccacctacactggccatttggaaaatgtagagaaagttgcagatgtcttgtcccaaattgaggccaagcatcctgattggagcaatactgatattccaatccatgcggatggcgcttcaggtgggtttattatcccatttggctttgaaaaagagcacatgaaagcttatggcatggaacgttgggggttcaaccatccgcgtgtggttagtatgaacactagtggtcataagtttggcttaaccactcccggtctgggttgggtgctatggagagatgaatccttactggctgatgaattgagattcaaactaaagtacctcggtggcgtggaagaaactttcggtttgaatttttcaagacctggatttcaagttgtccatcaatacttcaattttgtttctctaggccattcagggtatagaacacaattccaaaattctctatttgttgcaagagcgttttctttcgaattattgaattcgtcaaaattgcccggatgctttgaaattgttagcagtatccatgaaagcattgagaacgattccgcccctaagtcagttaaagactattgggaacacccccaggcttacaaaccaggtgtaccgctggtagccttcaaattgtccaagaaattccacgaagaatatccagaagtgccacaagcaatcctttcctctttactgagaggtaggggttggataataccaaattacccactaccaaaggcaacggatggatccgatgagaaggaggtattaagagtggttttcagatcggagatgaagttggatttagcacagttgttgatcgttgacatcgagagtatcttgacaaagttgattcatagttacgaaaaggtttgtcatcatatagaacttgcctctgagcaaactccagagcgcaagagttcgttcatctacgaaatgttgctggcattggcatctccacaagatgacatcccaacgccggatgaaatcgaaaagaaaaataagctaaaggaaacaacaacgagaaactatagaggaacatgttgagttgaaaaggtcatccaatataccgccccctatatgtatgtacctttaccttttatttaagtactagtgctgtttagttaggttatgtgaaggcacgggttttgt

SEQ ID NO: 2473 - DNA, 412 bp, Saccharomyces cerevisiae
caaaaaaaaaaaagactaataataaaaaatgaagttatctcaagttgttgtttccgccgtcgccttcactggtttagtaagtgctgctaacagttctaacagctcaagctcaaagaatgctgcccaaccaattgccggtttaaacaacggtaaggttgcaggcgccgctggtgttgctctagctggtgctttggcctttttgatttaaatttagactttgtttggaatacattgaaagagaaagagtggttaatcgggtgtagaaagaacaatccaaagtcacctttattggcgatatgtgtcattgttaatccattggccacatttttccgatgattttctctcggtgtgcaatatagtaataagttttcaccttttccggtgaataatgaaaaaaaaaaaacgaatacaa

SEQ ID NO: 2474 - DNA, 1074 bp, Saccharomyces cerevisiae
ctatcgaggttaggtgttacactacgctgttcattgaggaagtagatgaataaacttgttgatgcccactgtcatgttataaccgacccagacaacacattctgcggtgatgatggagggtcccagggtacgttgcgttgcgttatgtcatcaaacccatatgactggaacaatttgaaaaaattggctggcagaagcacaagtaaaaacgatatatgcgtgggatttggtgtgcatccttggtacagccacttattttatgtgggaagtcggcgcgacaaggtttctcactatcaagatgtactggagtataagaatgaagaacagttcgacagtttggttcaggtgcttcccgaacctctagatcttgaagagtatataaaaagagagtttaacgacactttggttagtgtgattggagaaatcggtcttgataagctcttcagacttcctgcaaatggtttctacatgcagaacgagaaggcaaggcttacgacagtgaaggtcaaactatcgcatcaagaaacagtattcaggcgattttggcgactggcaaggcacacaagcaagcccatctctatacacgatgtaaagtgccacgggaaactaaacgatatctgcaatgaagagctcttgacgtatcactctgtcaagatatgtttacattcgtacacaggctccaaggaaacgcttctgggccaatggctcaagaagtttcccccggatcgtatttttgtgagcctatccaaatggattaattttaaggacccagaagagggagatgccctggtcaggagcttgccctcaacttgcatacttactgaaaccgactatcctattgacaatccagatccgtcataccaaaaggcccttacagagcagctgcagtatttgaatgcacaaatcgcacgagcatgggacgagacactggatgcctcacaagccgctttgcgtgtatacgaaaactttcagaaatttatcaagtgaaacgcttttgaggtggcagcatagcactgtaatgagatatattaagtaggcttgctgtataccatttcttgctatgcatgtgtttta

SEQ ID NO: 2475 - DNA, 780 bp, Saccharomyces cerevisiae
gcattacaatctacgatcgcgcaaacttttttcttttggccatggaggattcgagattgcttatcactttgattcttgtgtttggagttatatttctgaaaaaattcttccaaagtaatcagcatccctcagcacaacgcttatccgctacaggtgtaaacgcacacggacgtcctcagggctccacgcagaatgccttgagaaggactggtagagtcaatggaggtcaccccgtgactactcagatggtggaaacagtgcaaaatctagcccctaacttacatcctgagcaaattaggtatagtttggaaaacacaggctcagtcgaggaaacagtggaaaggtacttgcgtggtgatgaattcagctttccacctgggtttgagccctccagggcgccaatgggggccaatgcggctgttgataataacgctgctggtggcggagagtttaacgatcccagaaagaagaacatgatttgcgctgagaatctactcgataaattccatgtggatctcaatgaagatatgagtaacttaagctttaaggacttagacattgaagagagaaagagattgttggtttggcaagccagaaagaatttggagacaaaattgcaaagtgataaagatttgcaaagtttgctgacttgaacgcttaagtgcttgtcgggaacacgcaagtgtgcccataatgcgcataagtatatctttgtgtttacttatttaaaatgactaaataaataacccaaaaaaaggaagaaaaaaatgtaattattaa

SEQ ID NO: 2476 - DNA, 3104 bp, Saccharomyces cerevisiae
ttgccttttccgtttctttttgttttagtaatcataagtttacggcttagcagcaagggcaaagggacaaaatgaatagtactaatagtactaatagtactacaacagctaccagtacaaacacgtcaactcaacaagtcgttacttctttggtaagtaatggtactatttttggtgtttttgtcatagcgttcttgattttgcgtataaaactaaaaaggatttatgagcccaaatcctcattcaatctgattaatgaagaaaaaaagccagaaccgctaccgcagggcgtctggcaatggctgaagccgttattgaaaaaatcagacaattttgtcattcaacaagccggtctggatggatatttctttttgaggtaccttttcatcattgcaatttactgtgctgtttccatgagttatatattccctattttgttgtccattaacgccagtaacggtaaccatgaaagcggattgaatcaattggcctatcagaacgtcaagcaccgtggtagatattttgcacatgttttctgtggatggattttcttttgggggttcctttacattatttacagagaattgtatttttacacctctatgaagcaagctgtactagcgtcccctcgttatgctaaaaaactatcctcgagaaccgtgttattccagactgtccctaagcaatacttaagtgaagaagagttttctaagttgtttgatggtgtgaaaagagtctggatcgcaagaggttccggttcaattgaagcaatggtcaaagcaagggacaatatggccatacaattggaaggtgctgaaacaaaatacctgaaagcagcattgaaaaaaattaagaagttaaacaaaaaaagtccgcaattatctgtctctgataatattgctgaatatgtccctgacaagaaaagaccacatcataaaattaacaaggttgctaaattcttttttggtaaaaaagttgacaccatatcctacattaaggaggagttgcccaagttaaaccaaaaggtgaaggcattacaagaagatcatgaaaattcatcccctttcaactccgtttttgtggagtttgaatcccaatatcaggcccaagttgccgctcagatcaccacataccatgctcctcttttcatgacgcctgtgtatattggtattgagccatccgatgtcgtttggtttaatttgaggatgttctggtgggaaagattaggtagggaagtcagtgcggtttcagcaattgtcgcgctagtaatattatgggctttcccagtggcttttgttggtatgatctctaatattacttccttgactaatgaagttaaatggttaaagttcatctataaattaccaaaacaactattaggtttactgacatctctggccccaactgtggcattggccgttttaatgagtttcttgccgaaatttattaggggtatggctatcactcaaggtgctccatctaagcaaaatgtggaatatttcactcaacaagcttatttcgcctttcaagttatccaagtctttttagttaccactctatcctccgccgccacttccacagtaacggaaattgttaaagagcccacgaaggctatggatctactggcttctaatctgccaaaagcttctaattttttcatgtcatacgttattctacaaggtctgtccatttcatcaggtgctcttttgcaaattgttccactaatactcttttatgttttaggtgcctttttagatggtaccgttaggaagaaatggaatcgtttttgtgggctatccagtatgcagtgggggacagcttttccagtttatacaaacttggcagttattactttctcctactccatcatttctccgttgattttattatttgctgccgtcgcgtttttcctattgtatattgcatatttatacaatttgacttatgtctatcaggaatcacccgacgcaaggggtatttattatccaagagctcttttccaaactatagttggtatctacatcggtcagatatgtctattaggtctttttgccgttggtaaaggttggggcccaatcgttttacaggtaattggaatttgtgttaccgtccttattcatttacatttgagcgctgcatttgatcatttatcaaaggttatacccgttgataccatgaaaccgttagatggtgtatcagatacaccttctttcaaaaatatttataaaggcatagaaagtacaaaggtgaagaaaaatacttttggtgcaaatattgacatggacggaatcaaagaattacctgaatttccaataaagaaatatcacaagaggagtgaatcagtcactgagcaacaagttgaaaatagcatatttagtgaaaatacattcgaatatcaattcaacccagcaaatgaagccaatgcagatgggcacgctataaatgcagaaaatttaattgaggacgtgccattattagcagatggtgatacaatgaaaattcctccggctccatggtggaagagattcttaaaacctcacatttactactcctataaggctgtaaagagcagactgccagaaatatatggtttggttgatcctgatgaaagagtcaatgatttcgatatctctcatgcttacgattatccagctgttagtgcacaatgccccgaattgtggattcctcgcgatccttttggattttccaaattgttgatttcagacgtttctggcgttgttgaaatgaacgatgaaaatgctaccatcgatgagaatttgaaatttactctgcgtgacgtaccaccaccatataatgatgttaaagacgaagcaaatggtgaagcaaatggcgaatttgacacagctagtaaggaaaataatccatttgcggacccaaagtataaggaagaagagagtcgttcggcagtctaaaggttaaacattatcagaaattatctattcctatttgtttagctgttatcctctgatggttgaattgtaattttactaagaaaaggagaggaaaaggacgtgcatatattcttttaatacatttaaaatatgattctaatcatttcttatataatagtgtatagtctaatc

SEQ ID NO: 2477 - DNA, 1192 bp, Saccharomyces cerevisiae
agctaatttaaccagcactaatagggagtacattcaattggaaactttgattcgcttgtatgcgtgaaaagcaaattcccttctagagaagttactgaaaaacatgaatttattacgaatgaatgctttaacaagcaaggctaggtcaatagaacggttaaaacaaacattgaatattttatccattcgtaatcatagacaattcagcaccattcaacaaggcagcaaatataccctcgggtttaagaaatacttgacattattaaatggagaggttggttcttttttccatgatgtccctttagatttgaatgaacatgaaaagaccgtaaatatgattgttgaagtaccaagatggacaactggaaaatttgaaatatccaaagaacttaggttcaatccgatcgttcaagatacgaagaatggcaagcttaggttcgtgaacaatatctttccctatcacggctatatacacaactatggtgctattccccaaacatgggaagatcccacaattgaacataaactggggaagtgtgacgtggctttgaaaggtgacaatgatcctcttgattgttgcgaaatcggttcggatgttttggaaatgggttccattaaaaaggtcaaggtattaggatcactcgctttaattgatgatggagaattggattggaaggtcatagtgatcgacgtaaatgatcctttatcctctaaaatagatgacttggaaaaaattgaggagtactttcctgggattctagatacgactagggagtggtttagaaagtataaagttccagcagggaagccattaaatagtttcgcctttcatgaacagtatcaaaattccaataaaaccatccaaactataaagaaatgtcacaattcgtggaaaaacctcatttcaggatcactccaggagaagtatgacaacctgcctaatacagaaagggctggtaatggtgtcacacttgaagatagtgttaaacccccttctcaaataccgcctgaggtgcaaaaatggtattacgtttaatatgaaaataataccttcgaagaaaatgtttagataaaggttccttgtatataattacgtaatctctgctctctcgaatgttggctgcttgatgtatgtgaacgtttggaaagaaacttgggtttatattcactgctaaaatgacatcctattaga

SEQ ID NO: 2478 - DNA, 1252 bp, Saccharomyces cerevisiae
caccgaatcattctagcacgataatgtcgttgaatatacatatcaagtcaggacaagacaagtgggaagtaaatgtggcacctgaaagcacagtgttgcaattcaaggaggcgataaacaaagcgaacggtatcccggtggcaaatcagagattgatctactcgggtaagattttaaaggacgaccaaaccgtggagtcataccacattcaagacggtcacagcgtccatctggtcaagtcacaacccaaaccacaaaccgccagtgccgctggcgcaaataacgccaccgccaccggtgcagcagctggcactggcgccaccccgaacatgtcgtcaggtcaaagtgcaggcttcaatccgctggccgacttgaccagtgccagatacgctggatatttgaatatgccatctgcagacatgtttggcccggacggtggtgcattaaacaacgactcgaataaccaagacgagctgttgaggatgatggaaaaccccatcttccaatcgcaaatgaacgagatgttgagtaaccctcagatgttggactttatgatccagtccaacccgcaattgcaggccatgggtccacaagccaggcaaatgctacaaagtcccatgtttagacagatgctcaccaatcctgatatgattagacagagcatgcaattcgcaagaatgatggaccctaatgccggtatgggctctgcaggtggggctgcctctgccttccccgctcctggtggcgatgctccagaggaaggctccaacacgaacactacttcctcatccaacacagggaacaacgcagggactaatgcaggtaccaacgcaggcgctaacacagctgcaaacccatttgcgtctcttctgaaccctgcattaaacccctttgctaacgcgggaaacgctgcatccaccgggatgcccgccttcgatcctgcattgctagcgtctatgttccaaccccctgtacaagcatctcaagcagaagacaccagaccaccggaagaacgctatgaacatcaattaagacaactaaacgacatgggcttcttcgatttcgatagaaacgtcgcagccctcaggagaagcggtggctccgtccaaggcgctcttgattcactactgaacggcgatgtttaaataaacgtctagatgccgcaacctatatacttttaccctactctatcggcatatatttaatctacgtattacatgtatccatcaataatatcatcataatatctgga

SEQ ID NO: 2479 - DNA, 2461 bp, Saccharomyces cerevisiae
cctttaattagcagccagggtactgtatttagtcatatagcggtacttgcattgaccgcgaacgtgtaaacacaagcaaagcagattatgaccacacaaataaggtctccccaaggcttgccgtatccgattcagatcgataaactcattccaagcgtaggttcgtaccttcatgagggtgataggttgcttgtctataagttctggtatttggtggaaagggcctcagacactggtgacgatgataacgagcacgatgtttcccccggcggcagcgccggaagtaatggtgtctctccgccaaccaaacaactgcgtgaatccatagaattcttcgaaagtccctacgagggggacttgattagttggaatgtagacgtaggagatgaagtagccactgctaaccaagtgatttgcgaaataaaaaggccatgtaaccatgacatcgtgtatggcgggctatgtactcaatgcgggaaagaagtttctgcagatgccttcgatggtgtaccactagacgttgtcggggacgtggatttacagattagcgagacagaagccattagaacaggcaaggcattgaaggagcatttgcgacgggataagaaacttatcttagtggtggatttagatcaaaccatcatccattgtggcgtggaccctacgattgcagagtggaagaacgaccccaataatccgaattttgaaacattaagagacgtcaagagctttacgttggatgaggagttagtactcccacttatgtacatgaatgacgatggttctatgctgagaccgcctcccgtaagaaaatgttggtactacgtgaaggtaaggcccggtttaaaggaatttttcgctaaagtggcgcctctttttgaaatgcatatctacacaatggctacaagggcttatgccttgcaaattgccaaaatcgtggaccctacgggcgaattgtttggcgatagaattctgtcgcgtgatgaaaatgggtctctaacaactaaatcattagctaaacttttccccactgaccagtcaatggttgtagttattgacgacagaggtgatgtttggaattggtgtccaaacttgatcaaagttgttccttataacttcttcgttggtgtaggtgacattaattctaatttcttgcccaaacaatctacaggaatgctacaactagggaggaagacaagacagaagagccaagaatctcaggaactgctgacggatattatggataacgaaaaaaaactacaagaaaagatagataaagaagttaaacgccaagaagaaaaattgaaccatcaactggcgactgctgaggagcctcctgcgaacgaatccaaagaagagttgaccaagaaactagaatattcagcatctttagaagtccaacaacaaaatcgacccttggccaaactacaaaaacacctgcatgatcaaaaactactagttgatgacgatgatgaactatactacttaatgggtacgctatcaaacattcacaaaacttattatgatatgctctcacaacaaaatgagccagaaccaaatctgatggaaatcataccaagtttgaagcaaaaagtcttccaaaattgctattttgttttttcaggattaatacccctcgggaccgatattcaaaggtcggacatagtgatatggacgagtacatttggtgccacttccactccagatatagattacctgacgacacatttaatcaccaagaaccctagcacttataaagcgcgtctagcgaaaaagttcaacccacagattaaaattgttcacccagattggatatttgagtgtttggtaaattggaaaaaggtggatgaaaaaccctacacgttaatcgtggacagccccatctccgacgaggaattacaaaactttcaaacacaattacaaaaaagacaagaatatctggaggagacccaggaacaacagcatatgttgacatcacaagaaaatctaaatttattcgctgctggtacttcatggttaaacaatgacgacgatgaagatattccggacacagctagcgacgacgacgaagatgacgaccacgacgacgaaagtgatgacgaaaacaactcggaaggcattgacagaaagaggagcatcgaggacaatcatgatgatacatcacaaaagaagaccaaggcggaaccttctcaagatggtcctgtacaacataaaggagaaggggatgacaacgaagacagcgattcgcagttggaggaagagttgatggatatgctggatgattagcagctcagatgccgtatctttccacacattttcctcattggtctttgtacctataattgttcatattatatatacgtttgtaacaaatcgataaatagcaacaatatttttgcttattttgatatcctgaaatccttttttttttttttttttttttttttttttttttgatttc

SEQ ID NO: 2480 - DNA, 2023 bp, Saccharomyces cerevisiae
tcgagccattagctgctgcaatttcaaaaaatgttgcaaggaattttagaaaccgtaccatctgacttgaaagatccgatatcattatggtttaagcaagaccgcaacccaaaaactatagaagaggtcaccgctctctgcaaaaaatccgactggaatgagttacacaaaagatttgattctagaattcagtttggcactgctggtttaagatcgcaaatgcaagctggctttagcaggatgaatactttagtagtcatacaagcgtctcagggattggcaacttatgtaagacaacagtttccagacaatttggtagctgttgtgggacacgatcatagattccattctaaggagttcgctagagctactgctgctgcatttcttttaaaaggatttaaggtacattatttgaatcctgaccacgaatttgttcatacccctttagttccctttgcagtggataagctaaaggcctccgttggcgtaatgataacagcaagtcacaacccaaaaatggataatggatataaagtatactattccaatggatgccaaatcattccacctcacgatcatgccatctctgattccattgacgcaaatttagaaccatgggccaatgtgtgggatttcgacgatgttctaaataaggctctcaaacaagggaaattgatgtattccagagaagaaatgctgaagttatatttagaggaggtttctaaaaatctggtagaaatcaacccattaaagcttgaagtaaaagccaaaccttggttcgtttacactccaatgcatggggttggatttgacattttcagcaccatcgtaaaaaaaacactgtgcctggtagaaggtaaggattacctatgtgttcctgaacaacaaaatccagatccttctttcccaactgttggatttcctaaccctgaagaaaaaggtgctttagacattggtataaacttggctgaaaaacatgacattgacttacttgttgccaacgaccctgacgctgatagattctctgttgctgttaaagatatgcagtcaggcgaatggcgacaactaacaggtaacgaaatcggttttctttttgcattttatgaatatcagaaatataaaagtatggacaaagaatttcagcacgttcatccgttggctatgttaaattcaacagtgtcttcacaaatgataaaaaaaatggcagaaatagaagggttccattatgaggatacattaacaggatttaagtggatcggaaatcgtgccatactcttggaaaagaaaggctattacgttccttttggattcgaggaagcaataggctacatgtttccagcaatggagcatgataaggatggtatcagtgcatccattgtcttcttgcaagcctactgtaagtggaaaatagaccacaatttggacccgctaaatgtcttagaaaatggcttcaaaaaatatggcgtgttcaaagagtacaatggctattatgtcgttccaaatccaactgttacaaaagatatatttgactacatcaggaatgtctacactcctgagggcgcgtcatatccttcatctattggtgaagaaatcgaagtactttactatcgagatttaaccactggttaccaatcggataccataaatcataaacctactctacccgtcgatcctacatcacaaatgataacagtatctgctagaccaagtaacggtagtgagaatgagcatatccgcttcactattcgcgggtccggaacagaaccaaaacttaaagtatatattgaagcttgcgcaaatgaagaacaaagagcctctttcttggcgaaattgacttggaatgtgctgagacgtgaatggtttagaccagatgaaatgaatatagttacaaaattttgatactattttaacctatacattaagaccaagcgacttaaagaatgccattatatttgttgtttgtacctacacttatatcaatatacatttaactagtttatgcctccaaacttctatcttcaga

SEQ ID NO: 2481 - DNA, 1125 bp, Saccharomyces cerevisiae
cgctgcgcttttatttataatcttgcattgccctccttatttatcgaattgttaagtgtagataggtgacgctagagccgtatattagattctttcaaaccctgaagaaaagttaaatgaagatgttgaggcgtacaaaggtaaatttttcaaaattgctttacaagattactaaactagcaatagtactgacgatcctatatatttattttacgcccaaaatcgtctcccgaaacaatgcatcattgcagcatatttttcctcataaatatggcgattatgaaatcaatttggtcatagcgcaccctgacgacgaagttatgtttttttcccccataatttctcaactgaattcgtactttccgagaaccgtcccatttaacataatctgcttatcaaagggcaacgccgaaggtcttggcgaaaccagggtaagagaattaaatgagtcggccgctttattgctacacaatgaaagagcagtctccgtacaggtgatggatttccaggatggtatggacgaaatatgggatattgattctataacttcttctctttcacaaaagatagatataaagaatcataacttgaaccagattatcgttacctttgattcatatggtgtatcaaatcatatcaaccacaaaagctgttatgctgccgttaaaaagttggtggatgattatgctcaacctaagaccaaaagaaatgaacaaccacctcatgtcactgcgctttatttgagaagctacaagaacaacatcgttttaaagtacaactcctttatttgggaaatcctaaaaatactttacgacctgatttctccattccgtagaataattcaggcgcttccgcctaacacagccgccgaaaaagacaagctttcacttatgaatacacatgcacaatacgtactagcgtttgccactatgctaaatgctcacgaatcccaagttgtgtggtttagatacggatggtggatattttccagatttgtcttcgttaatgaatttgatgtttatacatattagactctacactgtagatatatatataaaaaagtcccatattatttacatcctatagaataagaatatggagaaaaataaatgctaattctactta

SEQ ID NO: 2482 - DNA, 391 bp, Saccharomyces cerevisiae
tatcaggaatggtgttttacaaagtcacgttgagtaggtcgcttatcggtgtgccacacacaacgaagagcattgtcaaaagtttgggtttaggtaaaagagggtccatagtctacaaaaaagtaaacccggccatagctggctccctagctaaagtaaaagagttagtcaaagtagaagtaacagaacatgaattaacaccatcgcagcaacgagagttgagaaagtcaaaccctgggtttatagtggagaagagaaccatcgactgaaacagcgaaaataaggcaactggatttcctttcttcttgatattcctgacttatatatgtatatagtattattttttcctgcataggcacatatgttaatagtaatttatgcaatttttgat

SEQ ID NO: 2483 - DNA, 559 bp, Saccharomyces cerevisiae
tacagttcagcccagtgatcatttagcttacccatcatcgcgtaaaatgtggctcacagaggctcaaaaatttggtgtggccttcactttcggcggttttctcttctttttgtttggtatatttactttttttgatcgtgccctattggccttgggcaatattttgtttttaattggagtattcttaataatcggttcacaaaagacatatattttttttaccaggccaaacaaaaggcgcggttcactatttttcctagttggtgccttcttaatactgttgaaatggacatttttgggctttataattgaatctctaggtattataggtctctttggtgatttttttggcgtcatcgtacaatttttgagatcaatgcccataattggtcccatactttctcacccagcaatcgctccaatagtagataaattagcgggagttagggttctgccagtataatggtaaaattttgtatgtgaatatcatagattaattttttcgaactttctataggtataaagtaaaaataataatatttacatgattaacgttgtc

SEQ ID NO: 2484 - DNA, 1785 bp, Saccharomyces cerevisiae
caagacaagagagagagagagaaagaatactcactagagattgtttcttttctactcaacttaaagtatacatacgctatgaaagcattcaccagtttactatgtggactaggcctgtccactacactcgctaaggccatctcattgcaaagaccgttgggtctagataaggacgttttgctgcaagctgcggaaaaatttggtttggacctcgacctggatcatctcttgaaggagttggactccaatgtattggacgcttgggcccaaatagagcatttgtacccaaaccaggttatgagccttgaaacttccactaagccaaaattccctgaagcaatcaaaacgaagaaagactgggactttgtggtcaagaatgacgcaattgaaaactatcagcttcgtgtcaacaagattaaggaccctaaaatcctgggcattgacccaaatgtcacacagtacacgggttacttggatgtggaagacgaggacaagcatttcttcttttggacttttgaaagtagaaacgatcctgcaaaggatccggtcatcctttggttgaacgggggtccaggttgttcttcactaaccgggctgttctttgaattaggaccctcatccattggacctgatttgaaacccatcgggaacccttactcttggaacagcaatgccaccgtgatcttccttgaccagcctgtcaacgttgggttctcgtattccgggtcctcaggtgtttccaacactgtcgccgctggtaaggatgtctataacttcttggagttgttcttcgatcagttccctgaatacgtcaacaagggccaagatttccacatcgctggggaatcctacgccggccattacatccctgtttttgcctctgaaattttgtctcacaaggacagaaacttcaacttaacctccgtcttgatcggaaatggcctcactgacccattgactcagtataactattacgaaccaatggcctgtggtgaaggtggcgaaccatctgttttgccctcggaggaatgctctgctatggaagactctttggaacgttgtttgggcttgatcgagtcgtgctatgactcgcaatccgtctggtcctgtgttccagctaccatttattgtaataacgcccaattggctccttaccaacgtaccggcagaaacgtttacgatatcaggaaggattgtgaaggtggcaatttgtgctacccaacgttacaagatatcgacgactacttaaaccaggactacgtcaaagaagctgtcggtgcggaggttgaccactacgaatcctgtaacttcgatatcaacagaaatttcctgtttgcgggtgattggatgaagccttaccacaccgccgtaacagatcttttgaatcaagacctacccattctggtatatgcaggcgataaagatttcatctgtaactggttgggtaataaggcgtggacggatgtcttgccatggaagtacgacgaagaatttgcaagccaaaaagtacgtaactggactgcttctatcaccgacgaggtcgctggtgaagtcaaatcctacaagcacttcacctatttgagagtcttcaatggtggccacatggttccatttgacgtccctgaaaacgccttaagtatggttaacgaatggatccacggtggtttctccttataaagcgtgtatgtgtaggcataccgtttttattatcagctacgatcgaaatatatacgtttttatctatgttacgttatatattgtagtcttaaccatttgtaagttttg

SEQ ID NO: 2485 - DNA, 592 bp, Saccharomyces cerevisiae
caactaccgagtttgtaagtacaatgtctcaacccactcccatcataactacaaaatcagctgctaagccaaaaccaaaaatttttaatttattccgcgtttgcttcatttcattattgctgatcgctgcggttgaatacttcaagtatggtacaagaattaactatgaatggttccattgtaccccaatcaaagaaccccagtctggctcagtaatcaagctttgggcacgtggtgggccaagttgtgacaaaagaggcgaatataaaactatagtaaagagaatcactagagattatgaaccaaatgatgaacatctctcgttctgtatcatcgagaatgataatgttccacccgtccactacccaattcacgaagataaaggtgaacctggctacgtagcttatgtcgggtacgacacagactctgagctggttcaagaactatgtgctgattccacaatttatcacatgtgaattctttcttttacatacataaacatagaagaaatccaaccctgatatagggatttataaatgcgtgtgcatatctatatttatacatataaagagaaaaaaattgctcatgataa

SEQ ID NO: 2486 - DNA, 1931 bp, Saccharomyces cerevisiae
tatttcaaaatcagtttttatttttaaagtctgataaaacaaaaacaacaaacacagctaaatctcaacaatgttgtttaaatccctttcaaagttagcaaccgctgctgctttttttgctggcgtcgcaactgcggacgatgttccagcgattgaagttgttggtaataagtttttctactccaacaacggtagtcagttctacataagaggtgttgcttatcaggctgataccgctaatgaaactagcggatctactgtcaacgatcctttggccaattatgagagttgttccagagatattccatacctcaaaaaattgaacacaaatgttatccgtgtctacgctatcaataccactctagatcactccgaatgtatgaaggctttgaatgatgctgacatctatgtcatcgctgatttagcagctccagccacctctatcaatagagacgatccaacttggactgttgacttgttcaacagctacaaaaccgttgttgacacttttgctaattacaccaacgttttgggtttcttcgccggtaatgaagttactaacaattacaccaacacagatgcatctgctttcgtgaaggcagctattagagacgtcagacaatacatcagcgacaagaactacagaaaaattccagttggctactcttccaatgatgacgaagataccagagttaagatgactgattatttcgcttgtggtgatgatgatgttaaggctgatttttacggtattaatatgtatgaatggtgtggtaaatctgacttcaaaacttctggttatgctgatagaactgcagaattcaaaaacttatctattcctgttttcttctctgaatacggttgtaacgaagtaacaccaagactatttactgaggttgaagccttgtacggttctaatatgacagatgtctggtctggtggtatcgtatacatgtacttcgaagagactaacaaatacggtttagttagcatcgatggtaatgatgttaaaactttggatgacttcaacaactattcttctgaaatcaacaaaatatcaccaacttccgccaacacaaagtcttacagtgcaacaacaagtgatgttgcttgtccagctactggtaagtactggtccgctgcaacagaattaccaccaactccaaacggaggcttgtgttcatgtatgaatgcagccaatagttgtgttgtttccgatgacgttgattctgatgattacgaaaccttatttaactggatctgtaatgaagtcgactgtagcggtatttcagcaaacggtaccgccggtaagtatggtgcttactctttctgtacaccaaaggaacagctatctttcgttatgaatttgtactacgagaagagtggtggtagcaaatctgactgtagcttcagcggttctgccactctacaaactgccaccacgcaagctagttgctcctccgctttgaaagagattggtagtatgggtaccaactctgcatcaggtagtgttgatttgggttccggaactgaatccagtactgcctcttctaacgcttcggggtcttcttccaagtctaactccggctcttctggttcttccagttcttcttcttcttcttcagcttcatcttcatcttctagcaagaagaatgctgccaccaacgttaaagctaacttagcacaagtggtctttacctccatcatttccttatccattgccgctggtgtcggttttgctttggtttaaaaagcttcgacacatacataataactcgataaggtatggtatcttatttcattgtggggtagtttttacgaaaaaaatgaaaagttgtaagtatagtatatattttttttctatgtaagttttataagattctattcgctattaccaccggtaaattaaaaagaacactattgttacatta

SEQ ID NO: 2487 - DNA, 953 bp, Saccharomyces cerevisiae
aaataactaaatacacatttatgggtagtgttcaacgacaagatttggtcctattcagcgaccaatcagtgcttcctgcccactttttccaagacagcaactctcataacttattcttcatcacccatcaatcctgtactcaaccactatggatgataaacgcactagtagaaacgcacgtgttaggttccccaagttcccttaatgaatcttcttcatcgatgctaccttcgtcaactcgctcccatgcagtccttgcgtcgtttatccacgaacagaactattttacaaattcattaaacaagctaaagatcccatctaataactacaatgttttagacttcctgtccgacttcatcgttaataatatccataataagccaagagacaaaatactaagtgacgtactcgcaaagttctccgctgctatacaaaataacccaactgacaccattgttatcatcgaacaaccagaattactgttgtcgctagtaagcggcctaacttgttcagaattaaacaataagttcatcacacctcttttgaggcaatgcaaagtgctaatcattgtttccaattcggacatatttaatatagatgaatacgatgcttctgttcattcctcgaatctgcaaaatttctacaaatcttcctttatcaaatcaatgattaatttgaacttgaatcctctgaagaccggttttgcaaaggacgtaaccggctcattgcacgtttgcaggggcggcgcacccattgcaacttcaaacacaagcctacacgtcgttgaaaatgaatacctatatctgaatgagaaggagtcaacaaaactattttatcgctaaataatgataagattatatacgaggcacattgattctcgtattattgttttttctatgaactgaatatatttttaagtacaatatcaatgaaaaatatatgcaatcgagctc

SEQ ID NO: 2488 - DNA, 921 bp, Saccharomyces cerevisiae
gttcaagagaagtgggtaagaatacattgaactaagccttcatatatttacaaaacatgttcaggaacaattacgacggggacacagtcactttttctcctacaggccgtctgttccaagtggaatacgccttggaagctattaaacaagggagcgtcactgtggggttacgttcgaacactcatgctgttttagtagcgttgaaaagaaatgcagacgaattgtcatcataccagaaaaaaatcatcaaatgtgacgagcacatggggctctcgttagccgggttggctccagatgctagagttttaagtaattatttgagacaacagtgtaattactccagcttagtttttaacagaaagcttgccgtcgagagagcaggtcatttgctttgcgataaagcacagaaaaatacacaatcctatgggggcagaccctacggtgttggtttgttgatcatcgggtatgacaagagcggtgctcatcttttagaattccaaccttccggaaatgtcacagaactatatggtacagctattggcgcaagaagccaaggggcaaagacttatctagagagaactttagacacgtttataaaaattgacgggaacccggatgaactaatcaaagctggcgtcgaggctatcagccagtctctaagggacgaatccttgactgtagacaatctttcaatcgccatcgtgggtaaggatacgccttttacaatttacgatggagaagctgttgctaaatacatctaggtctggacacaaagtatcgtttccactaagcaattgtcaaagcaagaccaaagaagcctttcaccacggtcggggtttttttacatataaagataataatagattaacttagtacgtagtctcacttctcattcaaaattaaaaaagacgtggcttccaa

SEQ ID NO: 2489 - DNA, 1220 bp, Saccharomyces cerevisiae
ctatttgtttctgtacatcgaatagacccataatcacttcttggttccaaaaagtaaagtaatagccaaaaatgtccccattgaacgtcggtatagttggtacaggtatttttgccagagatagacatctcccatcctaccaggaatttcctgacaaattcaaagtcattgccgccttcaacagacataaggcaaaagctttggattttgcaaaggttgctgacatacctgaaaataaggtttacgacaatctagatgaaattttgaatgaccctcatgtcgactacattgacgctttgctacctgctcaatttaatgctgatattgtcgagaaggcagttaaagcaggtaagccagttattttggaaaaaccaattgcggccaacttagaccaagcaaaggagattgtcaagatagcagaatccaccccattgcccgttggtgtggctgaaaattggttatatttaccatgtattaaaatcgcaaaggagcagatcgagaaaattggtcctgtagtagcattcacccacaattctaccggtccatttgttactcaaaataaatatttgaccacaacctggagacaaaaaccagagcacattggcggatttctatctgatggtggtgtccaccaattagctctcgttatttccctactcggtgaatttggatctgtttctgcattaacgagacaggtgcgtgaacgttccggtgcagatgatattgtctttgctactgtccagttgaaaaataaagaggttatcggaagttttacttatgggtctgcctttggtgctaccgaaaagtcggttttcttgaaagtctatggtaagaatggtaccgttaccgttgacttatcagacaaaaaagaccccgttgtaaaagtcaaattagggggttcagctgaagataacggtgacgaacaaatttttaaagtcgataatgatgaaagtttcggcgtcaacgctgaatttttgaattttcacgaagctgtcagcaagaaggacaaatccttatacctaggcacacccagaactgcatttcaccatttggcttgtgtggacgcgtttttaaaatcttctgccaagaatggtgactacgttaaaattgagcagccatgattaccgttttacgatgtaacgcttttttaaccttaatagatagattccctcatatatttataactatgtacccacataagtatacttttggaatgataa

SEQ ID NO: 2490 - DNA, 1343 bp, Saccharomyces cerevisiae
taagtattaatatattagctgctgcagactagaaacgaaagcagtgataaatcattgatagacacacatttcctcatcgttgttcttcattatttacaggaaagagcagagaaaggaagaaagaaattgcaaaatatatgacaattaacacaaagaacatagttgttgttggtgctggtgtgtttggtgtgtctgtggcaaatcacttgtacagggaactgggtgggacatacgcaataaagctcgtcacagcatctaattatgtgtattttctaccctcagctgtccgtttgacggtttcaaaggattataccaagtcgatcctgccgttaaaaaatgttcttgatagtggtattgaagttatcaaagatacggctgccagctttgatgataaggaggtagttttggggtcagacagggccataaagtttgatatcttggttcttgcaactggctcaaagtgggctgatccaattggttcaacttataccttcggggataactataaagagtattttgaaagagaggcttctcgaatctcagatgcagatcacatactttttcttggcggtggctttgttaattgtgaactagctggtgaattgttattcaagtatttggaggagatcaggtctggcaaaaagcgtatttccattattcataattccgataagctactgccggactctgggttatacaacgataccctaagaaaaaatgtgacagactatctctcaaaaaatggtattacgttgtacttgaacacagtaggggcttctttagacacctcgccgaaacgtatttttctaggtgagggctcatctaaatatatagatgctgatttgatttacagaggcgttggtatttctccaaatgtgccggtcaacagtatttcagacctttgtgacaagaaagggttcattcaagttgaaaaaaacttcagggtaaaagctgttgaggcaggaaacgtttttgccattggtgatgtaacgaattttagatatcacggattggttaaaagagataattgggttgatgttttgacccgaaatgttataagttctttacaagaaggaacagaggctagtctcgttgatgcagattgtcttgagacaggacatgccccaagtggtgtctcccttgggccaaatgcagggtttggccaatttccactaccgttacttgggacgattaatattccatcgtttttaatttctagagcaaagtcgaagaatcttttctccgacaaaatggaacctttattcaaaaaatagactaaaatatgaactgcagcgtatatatatatatatatatatatatattagtttctgtattgtgaaaca

SEQ ID NO: 2491 - DNA, 3483 bp, Saccharomyces cerevisiae
catagtaacggtctgcatacagaaaagaaaacaaaaaaacagctagtatgcaattatatctgacacttctttttctattaagtttcgtcgaatgttcatatataagtttcatatcgaataatgcagacgaaatattggaaactgatttaattgaaactttatcttacgctactttgacagtaggtgagccttatgttgcacaatcggtggttgtaacaagagtatctgcagcttctcatagccctctctcagtttcgccaaaaaatagagtgagcgcatctccaattaattcacaagacagtgattctaatacaagaacagcagttcaactgtcattgtcgttatcaaactacgcaagccaagtatctcaaaaaataagcgcacaaaccaataatgatcctgtcactgtttcaaatatttacgcaaatgataattcgaaaagcaaaagttcagtacacaatttgagttcggtttccggcgtcgcctcagtcatgccaagtgcatcaacaatgcgtaaagtcaccacattattatctcaaactgcttcgacttcgacttcgactttattttcttcatctttatctatttcggggacacaattaaatggaactttattgacttctgtttcaaaaggtacaatcgatccactggtaactcaaatgccttcctattcttcccaagaaacaaaaattattccttcttcattgacctcgaataaaacgatatatactatttcagtaaggacaaatgcagctacagctaccggcgaagattccttcattgcttcaactcctgcttcctcgactttgttctatccatccaactcaacccaggatttagtccagacgctcgcatctacaacagcaagccctgcttacccatctaataggacacaaatcactctttctccatctgtatcactatattcgacaactagtccaatttacccttcaaacattacagaaaacggttcttcaccatcaccatcactatcatcgactgttagtccagtttatccatcgagttcaacaggaaacattcttttgtcatcactattttcaacagtagattcttcttcctctccggtttcttcgacattagataccatttatgtatcttcttcaatgcaagctaccatctcttcgtcctcatcttcgagacaaacaaaaacttcctcctcttctctgtcaacctcgaccagtagcaccgctaccacaacggagaactcttcaacaacgaccattgtcaatcttttcaatgctgtttcgacagatgaaccaccaactgtttttgacagatcaccaaatcctatgtcattggctgatggggtgtcaaacgatggtcccattcaaacaaacaagttttatacaaatttgattgttggtagtcaggaatcacctgcctttgtgtatccttattcattgtggaagtacacctcgagttcatatggttttgctgttcaacatacaacagtagatcaatatagctacggtggttatgacagttccggtaatgcagaatatttggtcaatcctttgggaattgctcatgttgttttctcagcttcgaattttgattcaagtatgactatgcaagttgatgaaatgaccttgtcttcaacaagggtagtgctatcagaatccaatgattcttcgaactacctggaaatacctttggttcaaggtatgggatttgcaactggtatatatcatggatctttaaatgccaagattggttccagcgtcggattcaataccattgtttctgaatcatcaagcaatttagctcagggtattctcaaatatcgtatcacccttttgaatggagtcacttggttatgttacgtgataggaccagacgatttaacctcaacggacttttcattggaggtgagctcagaatatgaaattaaagcaagcgctagtgttgatggtcttatcattcaattggccgtcgcaccttctgaaactgattacgaggtcttttatgatcaagccgcaggtatgtacgttactaatttcaagctgcagggtgtctctgacggttctacagctacctatgaattttcttataccacccaaggtgagtcggcatcaggtagcacaatgatttttgccttgccccatcatgaatcttcatttagtgatataatgcaagactactataccggcattcaactcgcttctacaactaagggtgtaatgaacggttatctaacaacgagcctacaattttccacatctctaaacagacaaatatcttggttaccatggtcttctcaacttggctcaaaccttttagagtattctaaagaacaattgcaattattagctgaagttgccaattccgaattacaggttagtatttccgaaagtataagcgggttaaacacatattatttgggtaaagttatcgataagtattcttacattctattaacggtctccgaaatcatccaagatgaagccagtactaagagtactttggaaaacatcaaatcggcctttgatattctgctacaaaatgaacagacgtatccactaatttacgacacaaagttcaacggtttggtcagttcaggagattggggttccaccagcacgcaatacgattttggtaacacttattacaatgaccatcatttccattatggttacattattcatgcagctgctgtcatcggctatgttgactctaaactgaatggtacttgggctgccgacaataaagattgggtcaattcattggtaagagatgtcgcaaatccatctgaaaaagatgaatactttgcacaatcgagaatgtttgattggttcaacggtcattcatgggcagctggactttatgaaaacggtaacggtaagaacgaagaaagtagtagtgaagattacaattttgcctatgctatgaagttatggggggccactatcggtgaccagtcaatggaattgaggggtgacttgatgattagtataatgaaggatgcaatgaacgactatttctattatcaaaatgacaacacagttgagcctgaagaaatcataggaaataaagtgagtggtattttattcgataatattatcgattatactacttattttggaacaaacacagaatatatccacggtattcatatgctacctatcacaccagtttcttctaatattcgttctgagactttcgtcgaagaagaatggcagactaaaatcgagccaattattgaatcgatagaaagcggctggacaggcatattgaagctgaatcaagcactcttcgacccagtagattcgtatgcatttttcagtgattcaacttttgattcatccacatatttggataacggaatgagtcgcacatgggcattagcattttcagggggactggccaactcaattgcttagaaagagaacttggcaagcaggtctgtcgagtctttcccactacatacatattttatagaataaatcatttttacttaacttg

SEQ ID NO: 2492 - DNA, 1033 bp, Saccharomyces cerevisiae
tcaaccataaataggagaatacaggcggtgcttacagcttgatattttgttaccaagtcaagatctataataataactcaatacatatatgttaaagttaacaacaacatccgttactttccacgtactaagatatttccaacttggcttatctgtaactaacttgttgttagctagttttgccataatcacaaactataaagtggatcgaatccttagattgagcttagctgtttcaatcatatcttcagtttattttgggattgtgagatttttgcctgttctgttaatattcgtgatggaaattgttcagaccgtcctgtggtttaccgctttcgtaactctagcttcaaaatttggttctatgtcctgctcaagtatgccacggggtataaactttgattattcaggttcttgtaagattgctaaaatagatattttaccagaagccgttttattcatactatttctcgctaccacatatgcttcttatatcacagtcctatctcaagctaaggaaaatgggtcaagcacaagatctgttttgaaggcttgtgtgaaggcattacgtgataccgtggaccgcttggagaccagtctggaagagagtgagcctcttttagatcttgaagttcaggaagatgcgaggactgaaaccgaaagcattgaggattcaactgatagtgaggataatgctaacatcgaacaagagaaagtgattgatggttcaattgagcattcttcatgatgaaccaaatgtcttgtagtgcatgctgtttctgactttgcttaatggatttttttagttcgacgatgttccgtatattttagaggcacacactttcacttttcctatgttgagtaatgaaggcatttgaagttacggaaccttataggtgtcagcacgctgtcattccagataattttgtgtctcccttacctccacatatgaatttggaataccaataattacctcttaaaaggtttcagaagacgtttactatttaattcttagctacacatcatatagtta

SEQ ID NO: 2493 - DNA, 2081 bp, Saccharomyces cerevisiae
catccttaattttacgatactatttcatgctattactaccaagttgacatcccttattatcttatttatttgaaactagaagaatagcaagtaaacactaaatccgaaagaatcgaagtatcatattacaatctacaggatataacaaaacagcttcgcaacttttgcatttctaacgaatataaagaaaagaactactatagaagaaagtttgcgagtgtgaatcttaaatttttaacagatggacaaatataccaacagggatcatccggactatattcctggcacatttaacatctattcttcccaaaatttggaaaatggtattatatacgaatcaaaattgaagaaaacctcctcaggagtcgtcctaatccctcaaccatcatactcgccaaatgatccactgaactggtctagctggaggaaattggctcattttggtctaatggcctttataactgcgtttaccgccgctactagtaacgacgctggtgctgctcaagactcattgaatgagatttatgggatatcctacgattccatgaacacaggggctggtgttcttttcctaggtattggttggtccactttattcttggctccatttgctaacttgtatggcaggaagattacgtacatagtttgcaccacattaggtctctttggtgcgctttggtttgctttggccaaaagaacgagcgacacaatatggtctcagttgtttgtaggtattagtgagtcctgtgctgaagcccaggtgcaactgtccctgagcgacatttttttccagcaccaattgggctccgtattgaccgtgtatatcatgtgcactagtatcggtacgttcttgggcccattgatcgctgggtacatatctgcatttaccaacttccgttgggtcggttgggtcgcagtgatcatatctggtggccttttaataactattatatttggctgcgaagaaacgtacttcgacagaggccagtatatgacccctttgaccagctgtcaatcgggatacgaagacggtaccactttacaaaactctgacaatacggccgtgtcgcgcaggaaacgtcatcttgacgctaaattatcaactcctggagccatgggtgagaaaggtgtagacctttcagagacggctgaattcgaagttaacaatgaagaggaagttaccatacctgagactcgcgaattgattgatggttcaaaagagcatttgaaaccatacccaaaaagagtagcaatattaaccaaagctactaatttgaaaggctacggttttaaacagtatttcaaatatctaaagatcaaccttagaatgttcttattcccgccagtgtggttgtctggtatgttttggggtattcaagacgttttcctgacgttttatttgaccactcaagaaagcgcctactacgaacctccatggaactatagtgattttggtgtcgcaattatgaatgttcccacacttattggagcagtcatcggttgtatctgtgctggcattgttagtgactactttgttctttggatggctcgtcacaatagaggaattttagaggcagaatttagactatacttctctatcgcaactgcaattattgggccagcgggtttgctgatgtttggtatcggtaccgctagacaatggccttggcaagctatatacgtcgggttgggttttgttgggtttgcatggggttgttctggtgatattgcgatggcgtatttaatggattgttaccccgatatggttttggaaggtatggtttgtactgctattattaacaacacgatatcttgcattttcacctttacctgttctgattggctagctgcatctggtactgaaaatacttacattgctttagctgtcatcaactttgggattactgcatttgctttaccaatgtactactatggtaagaggataagactttggactaagagatggtatttgcaatctgtcaatttgagagacggtgtgtaattcagagacgtctttcttgtatctagtagatgataggaattaagtattttttttttacctaactaggattataattgca

SEQ ID NO: 2494 - DNA, 1582 bp, Saccharomyces cerevisiae
aaaccactaaatatcaggggaggaataatacaatgggtactggtaagaaagagaaatctagacgtattcgtgaaggtgacaccaaagatggtaatcttcgtgtgaagggtgaaaatttctacagagactccaagagagtcaaattcctgaatatgtacactagtgggaaggagatcaggaataagaaaggtaatttaattagggccgcttctttccaggactccacaataccggatgcgagggtccaaccagatcgtcgttggttcggtaacacaagagtgatatctcaggacgcactgcagcatttcagaagtgcattgggtgaaacccaaaaagatacatatcaagttcttctgagaagaaataagcttcccatgtcattgttggaagaaaaggacgcagatgaatccccaaaagccagaattttggataccgaaagttatgctgatgcgtttgggcccaaagcccaaagaaagagaccacgtcttgctgcatccaatctagaggacttggtcaaggctacaaatgaagacattaccaagtatgaggaaaagcaagtcttagatgccacattaggactaatggggaaccaggaagacaaagaaaatgggtggacctccgcagcaaaagaagctattttcagtaagggtcaatccaaacgtatttggaacgaattatataaagtcatcgattcgtctgacgtggtaatacatgttctagatgcaagggatccattgggtacccgttgtaagtccgtggaagagtatatgaagaaggaaacaccacacaagcatttaatttatgttcttaataagtgtgatttggtacctacctgggttgcagcagcttgggtcaaacatttgtcaaaggaacgtccaactttggcgtttcacgcatctattaccaactctttcggtaaaggttcgttaattcagttgctacgtcagttctcacagttgcatactgatagaaagcaaatatctgtagggtttatcggctatccaaacactggtaaatcgtccatcattaacacattgagaaagaaaaaggtgtgtcaagttgcaccaatccctggtgaaactaaggtctggcaatatattactcttatgaaaagaatttttttgattgattgtccaggtattgtgccgccttctagtaaagactccgaagaagacattttattcagaggtgttgtcagagtcgaacacgtcacacacccagaacaatatattccaggtgttttaaaacgttgtcaggtaaagcacttggaaagaacttacgagatctcaggatggaaggatgccacggagtttattgaaattctggcaaggaaacaaggtagattactgaagggtggtgagcctgatgagtctggtgtttctaagcaaatattgaatgattttaatagaggtaaaatcccttggttcgtccttccacctgaaaaggaaggggaagaaaaaccaaagaagaaagaagttgagaagacggcatagaggtaaaaacggacaaccggtgtataatattaatttaagattacaagtgattttttttttctttttttttgttatttttttttttgttc

SEQ ID NO: 2495 - DNA, 1431 bp, Saccharomyces cerevisiae
ttatcagggcttccttgtttttcatactggaaatacttcgaacgattagaaacaggcaactcaattttatacatttataaagggtcaaaaaggattatgcaatctatgaatgtacaaccgagggtattagctgtaggaggtgagcagtttttctctcagaggcaggcttctgaacaacaccagcagcaaaacatgggacctcaggtgtattcgccaaaggttaatagagcaagaatgtttcctcaagggatgcctgtaaatacaattaatggctctgttaatcaggagatgaacaatgcctatcttttgaagcagaagaacgagccactgttaactcagcaacaacagcaacagcaacaacaacagcagccatttaatataggaacgcctgtttcggtggctagtttgccgcccggactgaacgttctgcagcaacaacaacagcagcaacaacaacagcagcaacagcagcagggagtgggactcaatcgtcccttggcttcccagctacccaagcatttaaccaaccaaagtatgccaccgatctttttaccacccccaaattatcttttcgttcgcgatgtctggaagtccaacctttacagtgaattcgccgttataagacaactggtctcgcagtataatcatgtgtcaatcagtactgagtttgtggggactttggctaggccgatcggcactttcaggtcgaaggtcgattaccactatcagacaatgagggccaacgtagacttcttaaacccaatacaacttggtctttccttgagtgacgccaacggcaataagcctgacaacggtccctcaacgtggcagttcaattttgaatttgacccaaagaaggaaatcatgtccacagaatcgttagaattactcagaaaatcaggtatcaacttcgaaaaacacgaaaatttaggcatcgatgtatttgaattttcgcagcttctaatggactctggtttaatgatggatgattctgttacttggatcacataccatgcggcatatgatctaggtttcctgatcaacattctaatgaatgactccatgcccaacaacaaggaggatttcgagtggtgggtccatcaatacatgcccaatttctacgacttaaacctggtgtataaaataatccaggagttcaagaaccctcaattgcaacaatcttcacaacagcaacagcagcagcaatattcactaaccacacttgccgatgagttagggctaccaagattctctatatttactactacaggcggccagagtctattgatgcttctatccttctgccaattgagcaagctgtctatgcataagttcccaaacggtacggatttcgccaagtaccaaggtgtcatatacggtattgatggggaccaatgatcatttatgtactatatgtatacacaattttaa

SEQ ID NO: 2496 - DNA, 2274 bp, Saccharomyces cerevisiae
ctttattaatagttctagagtgactacattatttcagattaggcaatattaccttttcgtaccgtttttttttcctgtccactgttactattgttacggttaaaagttctatcgcaaccggcggacgttaaactaagtcatttgttttttatcccattactgtttcaaaaaagagcaattcatacctaatttgtacaaaacgaagactgtacaagtggtagtacttgacataggatattttgcttgagtattagaagaatacgaaaaacttcttcagttttctagttaccgttagtaccaaaactattctagaggaagaataaacagtaagatattgctttaatttatttatatcacctaccacaagctttcgtttttttactctgtttaattcttcaagttgtgttttttccctacattttaattcatttttgcccatttaattacatttttttttttgttttattattttcgttcaaacctcattttctttcaaatattcaattagtcaatcattttacagagaatctgttgaaaacttattttactgatacatctttatttttcgttgatttttaaagagaaaaagatcacgaagaatactacaaaaccatcgcattttttttttcaagtgtgttatagttttattaccttgtcactaatagttgcatttgaagtcataccctcgaatagaagtatcaaataaaagaaaatgggtgttaccgttcaagacatatgttttgcctttttgcaaaactactacgaaagaatgaggaccgacccttccaaattggcatatttttatgcaagtacagccgagttgacgcatactaattatcagtccaagtcaacaaacgaaaaagatgacgttcttccaacggtgaaagttactggacgtgaaaacattaataagtttttttctagaaatgatgccaaagttaggagcttgaaactaaaattagatactatagatttccagtacactgggcacttgcacaaaagcattctgatcatggccacgggtgaaatgttttggacaggaactccggtctataagttttgtcaaacatttatcctgctaccatccagcaatgggtctacgtttgacattaccaatgatataatcagatttatttccaattcattcaagccttatgtcttaacagatgcttctttgtcacaatctaacgaggagaactctgtcagtgcagttgaagaagataaaataaggcatgagtccggagttgaaaaagaaaaagaaaaagaaaaatcaccagaaatatcgaaaccaaaggccaaaaaggaaacggtcaaagacacaactgcgccaactgaatcgtcaactcaggaaaaaccaattgtcgatcatagtcaacctcgggctatacccgtcactaaagagtccaagattcacaccgaaacggtaccatctagtactaagggcaaccacaaacaagatgaggtctctacagaagagttaggaaacgttactaaactaaatgaaaaatctcacaaagccgaaaagaaagctgcaccaatcaagacaaaggaaggctctgttgaggccataaatgctgttaataactcttctttgcccaacggtaaagaagttagtgatgaaaaaccggtacctgggggcgtaaaggaagctgaaactgaaattaaaccaatagagccacaggtttccgacgccaaagaatccggcaataacgcttcaacaccttcatcttctccagagcccgttgcgaatccaccaaagatgacatgggcctcaaagttgatgaatgaaaactccgacagaattagcaaaaataataccacggttgaatacatcagacctgaaacactacccaagaaaccgactgaaagaaaatttgaaatggggaatcggagggacaacgctagtgctaacagcaaaaataagaaaaaaccagtattcagcaccgttaacaaggacggcttttatccaatctacattagaggtacaaatggcttaagagaagaaaaattgagaagtgccttagaaaaagaattcggtaaagttatgaggataacagctgcagacaattttgccgtcgtcgactttgaaactcaaaagagccaaatcgatgctttagagaagaagaaaaagtcaattgatggtattgaagtatgcttagaaagaaaaacagtaaagaagcccacgagcaataatcctcctggcatatttactaatggaacacgttctcatagaaagcaacccctaaaaagaaaggactagtcaaccacaagcct

SEQ ID NO: 2497 - DNA, 1535 bp, Saccharomyces cerevisiae
tatataaaccgtagggtcctggtaaaattacatgggaaggatccttaggcagtagggaaaacttatcaggacaattgagttatattaacgtattatatattttaatatgggaaagaacgttttgttgctaggatctggttttgttgcacaacctgttatcgacacattggctgctaatgatgacatcaatgtcactgtcgcatgtagaacattagccaatgcgcaagcattggccaagccctctggatccaaggctatttcattggatgttaccgatgacagtgccttagacaaagttctggctgataacgatgttgtcatctctttgattccatacaccttccatccaaatgtggtaaagagcgccatcagaacaaagaccgatgtcgtcacttcctcttacatctcacctgccttaagagaattggaaccagaaatcgtaaaggcaggtattacagttatgaacgaaattgggttggatccaggtatcgaccacttgtatgcggtcaagactattgatgaagttcacagagctggtggtaagctaaagtcattcttgtcatactgtggtggtttaccagctcctgaagactctgataatccattaggatacaaattttcatggtcctccagaggtgtgctactggctttaagaaactctgctaaatactggaaagacggaaagattgaaactgtttcttccgaagacttaatggccactgctaagccttacttcatctacccaggttatgcattcgtttgctacccaaatagagactctacccttttcaaggatctttatcatattccagaagccgaaacggtcattagaggtactttgagatatcaaggtttcccagaatttgttaaggctttagttgacatgggtatgttgaaggatgatgctaacgaaatcttcagcaagccaattgcctggaacgaagcactaaaacaatatttaggtgccaagtctacttctaaagaagatttgattgcttccattgactcaaaggctacttggaaagatgatgaagatagagaaagaatcctttccgggtttgcttggttaggcttgttctctgacgcaaagatcacaccaagaggtaatgctttagacactctatgtgcacgtttagaagaactaatgcaatatgaagacaatgaaagagatatggttgtactacaacacaaattcggtattgaatgggctgatggaactaccgaaacaagaacatccactttagttgactatggtaaggttggtggttacagttctatggccgctactgttggttatccagttgccattgcaacgaaattcgtcttagatggtacaatcaagggaccaggcttactagcgccatactcaccagagattaatgatccaatcatgaaagaactaaaggacaagtacggcatctatctaaaggaaaagacagtggcttaaataagaagaaatgtatcaaaaggtttatcatacgtaacagtaacggcactttataaatctttctttagtattacttatactttcataa

SEQ ID NO: 2498 - DNA, 785 bp, Saccharomyces cerevisiae
cctaataccaactaccagtataactaagatttcacgcatatgatgagtcaagtatcgcattcccaagaaggatccgggcgattttggaacaagtttaagtcgtcaaccaaatcgttatctacatcgttggcacatttatccattaaagcagaaaaagatggtgatactgtaaatactacattggtccataaagggcttgtgaaattctatgaaaatcagcatcctttccaggggttcccaggatggttgggggagaaggaagatttaccgaacgaacgtaaaatattagatactcaagtgaagcatgatatgaagaagcaaaactcgcgtcatttctcgccatccttttctaacagaaggaaggcttcttcagaagatcctatgggtacaccttcttcaaacgggaacacaccggagtacacgcctgcgagtaaatcgtttcaagatatatacaataatcatacaagctcctctagcgcgacaccgagaagagcttcatcacggccgactagaccttcagcaggccaagaattcagggcaagtctcggtcgaagtaaaacgtcgaacagtttcaacacctccagcacgccaacgccgccaccagacgcaagtagtggagtaatggcaatgaaggacagactaaagagacgcaataacgattatggattttaaatagcactataccttgctgaaataaagcgaaaagaacatttaatgaatatataggtatcgtatatgtactgaataaagtgtttgatacagaatgcaaggagataatatagtat

SEQ ID NO: 2499 - DNA, 1165 bp, Saccharomyces cerevisiae
ctgtcgtagaataacagtgtcaactaatgtttatttggcagagaaagagtattttactagggaggtccattctgggcagcggccgagttaccgttgctggaatcattggaagcagcagaaagagatatacgtcttcttcctcctcctcctcctccccttcctcgaaagaatcagcacctgtgtttacgtcgaaagagttggaagttgcaagaaaggaaagattggatggactgggaccgttcgtgtctcggctgcctaagaaatggataccgtatgcggagctgatgaggctagagaaacccgtgggcacgtggctgttatatttgccctgcagttggtctatacttatgggagccatgatgcaaggtgctacattgagcgcaacagctggtatgttgggtattttcggtgtaggtgcattggtaatgagaggtgctggctgcaccatcaacgattttttggatagaaagttggatcaaagagttatcaggtccgtcgagaggcctatcgcctctggtagagtgagcccccgtcgggcgttagtattcttgggggctcaaactcttgttggaatgggcgttctatctttgcttcctgcgcagtgttggtggctaggccttgcatcgttacctattgtgttcacataccctttgtttaagcggtttacgtactatcctcaagctgcattaagtgcatgtttcaattggggagcgttacttgggtttcctgccatgggtgtaatgagctggcctacaatgatacctttgtacctgagcagttacttgtggtgtatgacttacgatactatatacgcacaccaggataaaaagtttgacatcaaggctggaatcaagtctaccgctttggcttggggtccacgcacaaagtctatcatgaaggccatgtccgcgtctcaaatcgcactgttagctgtcgccggcttgaacagtgggttgttatgggggcctgggttcattggtggactaggagtcttcgcttatagactcttcagcatgataaagaaagtggatcttgacaatcctaaaaactgctggaagtattttaatgcaaatatcaacaccggactttactttacgtacgccttggcagtcgactacatcttgagactgtttggattcttgtagatatagcgtgcatatacaag

SEQ ID NO: 2500 - DNA, 383 bp, Saccharomyces cerevisiae
tgtccaccaaaaataaaatgcaaccggcagctagacttttatcgcggtccgtatggaagggccccaacatcgtgccattacccataagggaggccatgactaagggcactccaataagaacaaacgcaagggccgccaccatccttcctcagttcgtgggactgaaatttcaaatacacaatggtaaggagtacgtacctattgaaatatcagaagatatggtgggccacaaactgggcgagttcgcacctaccaggaagcgtttcagctatactcaaaccaagaacaaatgagggatctagtgtatatagatttctagatgatatatcatgtaaataagatcaagccagactcgggctgtatatatatatatatatagcata

SEQ ID NO: 2501 - DNA, 609 bp, Saccharomyces cerevisiae
acaagagccatgttgtcgaggtttatgtccaacacatggtgtacgcccttgagacaggcgcagagattgttttcctccactacgacaatgcaagcgacattgaatcagattaaaagaggctccgggcctccaagacgcaagaagataagtacagctccacaactggatcagtgtccccagcggaagggtgtcgtattacgtgtaatggttttaaagcccaagaagccgaattctgcgcagagaaaggcgtgcagggtccgtttgactaacgggaacgtggtatctgcatatataccgggtgagggccacgatgctcaagagcattcgattgtatatgtcagaggtgggcgttgtcaggacttgcctggtgtgaagtaccatgttatcagaggtgctggtgacctgagtggtgtggtaaacaggatttcttcgaggtcgaaatatggagccaagaagccaagtaaatcgtgatgcgcagtacgctctaagttttctttggcctctcgactacttttctctaatattcccactccatacaaccttttgtaaatagcaatgaccatacatatatatatatatatatatatatatgtattctcagtatacgca

SEQ ID NO: 2502 - DNA, 1096 bp, Saccharomyces cerevisiae
gcctcaaaacggtaatccgcaatgctacacttacaaccacaaaaccttctcatccaaaagacactgaatgaagcgatagaggcacttcgcaagggttcgccgttgaccatggacagaattgtttccgatttcgactataccacctaccacatttcaaacacagcagaagataagtccattctgttgttgagtgttaagaccaaagcttgggtaagtgtctctgagtgccaattggacggttctttgacgttactgaagtttctggccgaccactactcctctttgggtggggtgactatcccaagtgaagtggagcccggctatgactacactcttcagattacgttggccgaattggttcaagaatcgattttacaactgtctgttttgaagaccattatattgagttttcccttcgaattggccatttcgaagtttattgaactaagccagcagcaaccggcacctgtcgaagcagaaattactggcggtgaggttgctgccaatggagacaacactttgttcacaatcaagtatcgtgacgaggagaacatcttcatcaaaccttccaatgacagagttaccataatcttcgagactatttttcaagacgaaacagataaaatttttggcaaggtctttttacaagaattcgtggatgcacgtaagagaaaccgtcaaatccaatccgctccacaagttttatactcacatgaaccaccattggagttgaagagactatatcaaccacctaaagttgcagagcaaagtagaagatttatcacgtttgttcttttcccacgtcatttccagacaaaagagttgcaattccattcaatttgccagttaacattgtttagaaactacttccattatcacataaagtgctctaaagcctacatgcactccagaatgagattcagagtggactcgttcatcaaagtcttaaatagagccaaggtggacgaagatgatgaaaatgatgaattgagtgcagaaggcagacaacaggcaagaagaaccttcaccggtagaaagattgtctactagaaagattaaataagtacgtaagaatccgtaaaaagggttataacta

SEQ ID NO: 2503 - DNA, 329 bp, Saccharomyces cerevisiae
agcttagattgcaaataaatactctgaaaatgattgaggtagttgtgaatgaccgattaggcaaaaaagtcagagtgaagtgccttgctgaagatagtgtaggtgatttcaaaaaagtattgtccttgcaaattggcacccaaccaaacaaaattgtgttgcagaagggtggaagtgttttaaaagaccatatctctctggaagattatgaggtacatgatcagacaaatttggagctgtattacctgtagaaaatgcgctgtttttttttttttgatctaaatacacaatacatacatttgcaaccgagagagatagaatatgtagaa

SEQ ID NO: 2504 - DNA, 529 bp, Saccharomyces cerevisiae
aacgaaacaggtcgaccaaagatgctacattgcacccaggtgtgtctgagcgctctgacaaagagaacccacagggtcaaggttcaagtcctgaaggatttcccgcgatttcaattatataaaggacaagttgcaaatgtcaaaccatctttaatgagaaactatttacataacttcaatggtgcaaaatacatactcagcgaagaacacgacataaatacggaactgttaaaacaataccaaacacttgaggcaaagctagaggaagaccatcaacagctctctaaacgccatgaaacggaagttcaaaagaacatggagttacgtaaagaatctgtttttggccacaagaaagaagagaagccaaaagaggaaaagaagggattattggattctgggattactatcgaagaggttaagatccccggtcttgacatttgattggtaaagagtatgtattcagatagcgtacaatcttgtatataggcaacatcgcaattcaaaacaccacataccaatttacatactt

SEQ ID NO: 2505 - DNA, 7327 bp, Saccharomyces cerevisiae
atcactgtcacaattgttatcggttctacaattgttctgctctcttcaattttcctttccttattctactctttttatccctttcgtacagtttacctgaagataaaaaacaacaaagccaattccctaatttgcaatcgccatttgcatctatatatatatatttgttgtgccatttttttatcctctgtgagtgatcggtgcatgtgtttataaaagtttattcattctactatacgaacttttccctctgcccttccctcccgcttcatccttatttttggacaataaactagagaacaatttgaacttgaattggaattcagattcagagcaagagacaagaaacttccctttttcttctccacatattattatttattcgtgtattttcttttaacgatacgatacgatacgacacgatacgatacgacacgctactatactatacaaatataatagtataataaccgattcgtcttctagcttaatttttttccgttcccgaaacagcgcagaaaattagaaaaaatcaagtttctaccatgagcgaagaaagcttattcgagtcttctccacagaagatggagtacgaaattacaaactactcagaaagacatacagaacttccaggtcatttcattggcctcaatacagtagataaactagaggagtccccgttaagggactttgttaagagtcacggtggtcacacggtcatatccaagatcctgatagcaaataatggtattgccgccgtgaaagaaattagatccgtcagaaaatgggcatacgagacgttcggcgatgacagaaccgtccaattcgtcgccatggccaccccagaagatctggaggccaacgcagaatatatccgtatggccgatcaatacattgaagtgccaggtggtactaataataacaactacgctaacgtagacttgatcgtagacatcgccgaaagagcagacgtagacgccgtatgggctggctggggtcacgcctccgagaatccactattgcctgaaaaattgtcccagtctaagaggaaagtcatctttattgggcctccaggtaacgccatgaggtctttaggtgataaaatctcctctaccattgtcgctcaaagtgctaaagtcccatgtattccatggtctggtaccggtgttgacaccgttcacgtggacgagaaaaccggtctggtctctgtcgacgatgacatctatcaaaagggttgttgtacctctcctgaagatggtttacaaaaggccaagcgtattggttttcctgtcatgattaaggcatccgaaggtggtggtggtaaaggtatcagacaagttgaacgtgaagaagatttcatcgctttataccaccaggcagccaacgaaattccaggctcccccattttcatcatgaagttggccggtagagcgcgtcacttggaagttcaactgctagcagatcagtacggtacaaatatttccttgttcggtagagactgttccgttcagagacgtcatcaaaaaattatcgaagaagcaccagttacaattgccaaggctgaaacatttcacgagatggaaaaggctgccgtcagactggggaaactagtcggttatgtctctgccggtaccgtggagtatctatattctcatgatgatggaaaattctactttttagaattgaacccaagattacaagtcgagcatccaacaacggaaatggtctccggtgttaacttacctgcagctcaattacaaatcgctatgggtatccctatgcatagaataagtgacattagaactttatatggtatgaatcctcattctgcctcagaaatcgatttcgaattcaaaactcaagatgccaccaagaaacaaagaagacctattccaaagggtcattgtaccgcttgtcgtatcacatcagaagatccaaacgatggattcaagccatcgggtggtactttgcatgaactaaacttccgttcttcctctaatgtttggggttacttctccgtgggtaacaatggtaatattcactccttttcggactctcagttcggccatatttttgcttttggtgaaaatagacaagcttccaggaaacacatggttgttgccctgaaggaattgtccattaggggtgatttcagaactactgtggaatacttgatcaaacttttggaaactgaagatttcgaggataacactattaccaccggttggttggacgatttgattactcataaaatgaccgctgaaaagcctgatccaactcttgccgtcatttgcggtgccgctacaaaggctttcttagcatctgaagaagcccgccacaagtatatcgaatccttacaaaagggacaagttctatctaaagacctactgcaaactatgttccctgtagattttatccatgagggtaaaagatacaagttcaccgtagctaaatccggtaatgaccgttacacattatttatcaatggttctaaatgtgatatcatactgcgtcaactatctgatggtggtcttttgattgccataggcggtaaatcgcataccatctattggaaagaagaagttgctgctacaagattatccgttgactctatgactactttgttggaagttgaaaacgatccaacccagttgcgtactccatcccctggtaaattggttaaattcttggtggaaaatggtgaacacattatcaagggccaaccatatgcagaaattgaagttatgaaaatgcaaatgcctttggtttctcaagaaaatggtatcgtccagttattaaagcaacctggttctaccattgttgcaggtgatatcatggctattatgactcttgacgatccatccaaggtcaagcacgctctaccatttgaaggtatgctgccagattttggttctccagttatcgaaggaaccaaacctgcctataaattcaagtcattagtgtctactttggaaaacattttgaagggttatgacaaccaagttattatgaacgcttccttgcaacaattgatagaggttttgagaaatccaaaactgccttactcagaatggaaactacacatctctgctttacattcaagattgcctgctaagctagatgaacaaatggaagagttagttgcacgttctttgagacgtggtgctgttttcccagctagacaattaagtaaattgattgatatggccgtgaagaatcctgaatacaaccccgacaaattgctgggcgccgtcgtggaaccattggcggatattgctcataagtactctaacgggttagaagcccatgaacattctatatttgtccatttcttggaagaatattacgaagttgaaaagttattcaatggtccaaatgttcgtgaggaaaatatcattctgaaattgcgtgatgaaaaccctaaagatctagataaagttgcgctaactgttttgtctcattcgaaagtttcagcgaagaataacctgatcctagctatcttgaaacattatcaaccattgtgcaagttatcttctaaagtttctgccattttctctactcctctacaacatattgttgaactagaatctaaggctaccgctaaggtcgctctacaagcaagagaaattttgattcaaggcgctttaccttcggtcaaggaaagaactgaacaaattgaacatatcttaaaatcctctgttgtgaaggttgcctatggctcatccaatccaaagcgctctgaaccagatttgaatatcttgaaggacttgatcgattctaattacgttgtgttcgatgttttacttcaattcctaacccatcaagacccagttgtgactgctgcagctgctcaagtctatattcgtcgtgcttatcgtgcttacaccataggagatattagagttcacgaaggtgtcacagttccaattgttgaatggaaattccaactaccttcagctgcgttctccacctttccaactgttaaatctaaaatgggtatgaacagggctgtttctgtttcagatttgtcatatgttgcaaacagtcagtcatctccgttaagagaaggtattttgatggctgtggatcatttagatgatgttgatgaaattttgtcacaaagtttggaagttattcctcgtcaccaatcttcttctaacggacctgctcctgatcgttctggtagctccgcatcgttgagtaatgttgctaatgtttgtgttgcttctacagaaggtttcgaatctgaagaggaaattttggtaaggttgagagaaattttggatttgaataagcaggaattaatcaatgcttctatccgtcgtatcacatttatgttcggttttaaagatgggtcttatccaaagtattatacttttaacggtccaaattataacgaaaatgaaacaattcgtcacattgagccggctttggccttccaactggaattaggaagattgtccaacttcaacattaaaccaattttcactgataatagaaacatccatgtctacgaagctgttagtaagacttctccattggataagagattctttacaagaggtattattagaacgggtcatatccgtgatgacatttctattcaagaatatctgacttctgaagctaacagattgatgagtgatatattggataatttagaagtcaccgacacttcaaattctgatttgaatcatatcttcatcaacttcattgcggtgtttgatatctctccagaagatgtcgaagccgccttcggtggtttcttagaaagatttggtaagagattgttgagattgcgtgtttcttctgccgaaattagaatcatcatcaaagatcctcaaacaggtgccccagtaccattgcgtgccttgatcaataacgtttctggttatgttatcaaaacagaaatgtacaccgaagtcaagaacgcaaaaggtgaatgggtatttaagtctttgggtaaacctggatccatgcatttaagacctattgctactccttaccctgttaaggaatggttgcaaccaaaacgttataaggcacacttgatgggtaccacatatgtctatgacttcccagaattattccgccaagcatcgtcatcccaatggaaaaatttctctgcagatgttaagttaacagatgatttctttatttccaacgagttgattgaagatgaaaacggcgaattaactgaggtggaaagagaacctggtgccaacgctattggtatggttgcctttaagattactgtaaagactcctgaatatccaagaggccgtcaatttgttgttgttgctaacgatatcacattcaagatcggttcctttggtccacaagaagacgaattcttcaataaggttactgaatatgctagaaagcgtggtatcccaagaatttacttggctgcaaactcaggtgccagaattggtatggctgaagagattgttccactatttcaagttgcatggaatgatgctgccaatccggacaagggcttccaatacttatacttaacaagtgaaggtatggaaactttaaagaaatttgacaaagaaaattctgttctcactgaacgtactgttataaacggtgaagaaagatttgtcatcaagacaattattggttctgaagatgggttaggtgtcgaatgtctacgtggatctggtttaattgctggtgcaacgtcaagggcttaccacgatatcttcactatcaccttagtcacttgtagatccgtcggtatcggtgcttatttggttcgtttgggtcaaagagctattcaggtcgaaggccagccaattattttaactggtgctcctgcaatcaacaaaatgctgggtagagaagtttatacttctaacttacaattgggtggtactcaaatcatgtataacaacggtgtttcacatttgactgctgttgacgatttagctggtgtagagaagattgttgaatggatgtcttatgttccagccaagcgtaatatgccagttcctatcttggaaactaaagacacatgggatagaccagttgatttcactccaactaatgatgaaacttacgatgtaagatggatgattgaaggtcgtgagactgaaagtggatttgaatatggtttgtttgataaagggtctttctttgaaactttgtcaggatgggccaaaggtgttgtcgttggtagagcccgtcttggtggtattccactgggtgttattggtgttgaaacaagaactgtcgagaacttgattcctgctgatccagctaatccaaatagtgctgaaacattaattcaagaacctggtcaagtttggcatccaaactccgccttcaagactgctcaagctatcaatgactttaacaacggtgaacaattgccaatgatgattttggccaactggagaggtttctctggtggtcaacgtgatatgttcaacgaagtcttgaagtatggttcgtttattgttgacgcattggtggattacaaacaaccaattattatctatatcccacctaccggtgaactaagaggtggttcatgggttgttgtcgatccaactatcaacgctgaccaaatggaaatgtatgccgacgtcaacgctagagctggtgttttggaaccacaaggtatggttggtatcaagttccgtagagaaaaattgctggacaccatgaacagattggatgacaagtacagagaattgagatctcaattatccaacaagagtttggctccagaagtacatcagcaaatatccaagcaattagctgatcgtgagagagaactattgccaatttacggacaaatcagtcttcaatttgctgatttgcacgataggtcttcacgtatggtggccaagggtgttatttctaaggaactggaatggaccgaggcacgtcgtttcttcttctggagattgagaagaagattgaacgaagaatatttgattaaaaggttgagccatcaggtaggcgaagcatcaagattagaaaagatcgcaagaattagatcgtggtaccctgcttcagtggaccatgaagatgataggcaagtcgcaacatggattgaagaaaactacaaaactttggacgataaactaaagggtttgaaattagagtcattcgctcaagacttagctaaaaagatcagaagcgaccatgacaatgctattgatggattatctgaagttatcaagatgttatctaccgatgataaagaaaaattgttgaagactttgaaataaaccttgtaaagtaaaaaaaaaaaatagtattgatgtaatttaatttagttgctaatataaattagaaaatacatacatat

SEQ ID NO: 2506 - DNA, 2799 bp, Saccharomyces cerevisiae
aactgtgaaggtgacacggtaacttgcagactgacatgaagttctcgcattccttacaattcaattctgtaccagaatggtctaccaagtatctggcctattcgcagctgaaaaaattgatctattctttgcaaaaagataagctgtacagtaacaataagcaccatgttgtggagccacatgacgccaacgatgaaaatctgccgctattggcagatgcttctccagatgatcaattctacatctctaaatttgttgctgccttaaaccaagaattgaaaaaaattgataaattctacatatctcaagaaacaggtcttatcgccaactacaacgaattgaaggacgatgtcatggaactggaaaacacgaacaaggccacccaattgtttaatcagcagcaacagcatcaactgcaaagtgttgcaagaaacaggaagtctaagtcacaacaacgccaaagaaggtttagtagtgtctcctccacggactccaacccctctctgacagacatgtcgattgactctgcacccgtcatccacacgcaggtctcgaacacgactaataatggtaactcaatgcaaaacctggcctccgcttcagtgtcgctttctaactctaaccctgtgtatctttctccttttacccaacataggctctctttaaagaaaagattgatatcgatctacacccagttgtccgagttgaaggactttattgagttgaaccagaccgggttctccaagatctgcaagaaatttgacaagtccttaaatacgaacttgaagcagaactacttgaactatatcaaattccattcgcatgttttcaatcctgctacaataaataggattcagcatcacattaccgagaccatcctcacttacgctagcttgaacaagggcacgcgtcgaccatctaatacgtttaacttggacgctgaccgaatcaacaatgacgaaaacagcagcggtaatgaagaagacgaagatggcaacagacaagaagtcctcgatttccaggatgctgagcgtgaattatcctctcatttgagagatcacgtagtttgggaaagaaacaccgtttggaaagatatgatgaatttggagagaaagtaccaatctgccaagactgacaacaagaagttttcaaagttgagttccagtcaattgcgccccaatgccaacattactgaatccatggcaatgtcgagtggtggcgccggtatcatcgctccatcaacggattccctaactttccgtgaactcatgcatttaccacccaagcaatggttgcaatttatcatgggccaaacttccctgctgaagtttctgttaatcacctcatgtttcattgcattattaacttttaatttgactccttttacgcaggattccttacagaaaaactgtttcgccatcttaatatatgcatctttattatgggccactgagaccatcccccttttcgtgacttctctaatgattcctctgcttattgtagtgttccctgttatcaaggaccctatcacctcccaaccaatgtctccccgtgattcctctcagttcatcttatcaacgatgtggtcgagtgtcatcatgcttttgctgggtgggtttactttagcagccgccctttccaagtacaacattgccaaagtcctttctacgcatattttggcatccgccggtacaaacccacattttattcttttaacaaatatgtttgtggcgctctttgtttccatgtgggtttctaatgttgctgcccccgttctttgctattcaattgttcaacctttgctcagaacactgccaagaaattgttcctatgccaaagctctaattcttggtatcgctcttgcctccaatatcggtggtatgtcttctcccatcgcttctcctcaaaacattttttctattggtataatggacccttcaccatcttgggctgaatggtttatgattgcgctacctgtgtgctttatttgtgtcatggcaatttgggtgctattgatcataaccttccctcctgagccaaatgtgaaaattttgcaattgcatccatcccgtgatccattcactctgaagcaatggtttgtcactttagtttgcattataacaattgttctttggtgtctttcaaaccaaatctccggtatctttggtgaaatgggaatcatatctattatacctatagtagtcttcttcggtacaggtcttctaacttcggatgatttcaataatttcatgtggacaatcgttgttttggccatgggaggtaccaccctaggtaaggcggtaagctcatccggtttattgtctacaatggcacagttaattaaggcgcaggttgagcatgaaccaatcttcattattgtgttgatcttcggtctagtgattcttgtaatggccacttttgtctcccataccgtcgcggcaatgatcatcgtaccattaatgagtgagatcggttccaatctaccttcaggtgatcattctagactattgatcgttatagccgccctattatgctctagtgctatgggtcttccaacctctggtttccccaacgtgactgccatttcaatgattgatgaagttggtgatagatatttgaccgtgggtacatttattacgagaggtgtaccagccagtttgttaagttatgccgctattgttacagtaggttatggcatattgaaagtaatgggattttaagattatccatagagagaatgaaaggttactaatatagtatgtatacgtgcactattatttaattttactttatattgcc

SEQ ID NO: 2507 - DNA, 1055 bp, Saccharomyces cerevisiae
gaatttacagcgccaatatcctgaatatgagtggaatgatagaaaatgggttacagctatcggacaatgctaaaaccttacatagccagatgatgtcgaaaggaataggcgcattatttacacagcaagaactccaaaaacaaatgggaatcgggtcgttaacagacttgatgtccattgtacaggaattgctagacaagaacttgatcaaattagtaaaacaaaacgacgaattaaaatttcaaggtgtcttagaatctgaggcgcaaaagaaagccaccatgtcggctgaagaggcactggtatattcttatatcgaggctagcggtagagaagggatatggtccaagactatcaaggcaagaaccaatctccatcagcatgtagttcttaaatgcttgaagagtttagaatcccaaagatacgtgaagagtgttaagagtgtaaagtttcccacaaggaaaatctacatgttgtacagcttacaaccctctgtggacatcacaggaggtccatggttcacagatggagagctggatatagaatttatcaatagtttattgactattgtttggaggttcatatcagagaacaccttccctaatggcttcaagaatttcgaaaatggacccaaaaaaaacgtcttttatgctccaaacgtaaaaaattactctaccacacaagaaattttggaatttattacagcggcacaagtggccaatgtcgagttaaccccttcaaatatcagatctttgtgtgaagtcttagtgtacgacgacaagctggaaaaagtcacgcatgactgctatagagtgaccttagagagcattctacaaatgaaccaaggtgagggcgagccggaggcaggtaataaggctttggaggatgaagaagaattttccatctttaactacttcaagatgtttccggcttcaaaacacgacaaggaagtggtctatttcgatgaatggacaatttgaagttcttgactacccctatctcacactagtacgtaattcaatgtatcattcgtattgtaagtagatagagacgca

SEQ ID NO: 2508 - DNA, 1644 bp, Saccharomyces cerevisiae
aaccaggtttgttttggcttttatttgcatttaagtaattacaattacaaccattaaaaagaaaataaggcaaaacatatagcaatataatactatttacgaagatgtcagcgatattatcaacaactagcaaaagtttcttatcaaggggctccacaagacaatgtcaaaatatgcaaaaggctctttttgcactattgaatgctcgccactatagtagcgcctccgaacaaacgttgaaggagagatttgctgaaattatcccagcaaaggcagaagaaattaaaaaattcaagaaagaacacggtaaaaccgttattggtgaagttcttttggagcaagcttatggtggtatgagaggtattaaaggccttgtttgggaaggttccgtgttagaccccgaagaaggtattagatttaggggtcgtactattccagaaattcaaagggaactaccaaaggctgagggtagtacagaacctttgccagaagctttattttggttgcttttgactggtgaaatacctactgacgctcaagttaaagccctttctgctgatttagctgccagatcagaaattccagagcacgttatccaacttttagatagcctcccaaaagatctacatccaatggcgcaattttctattgccgtgactgctttagaaagcgagtctaagtttgccaaagcatatgctcaaggtgtatccaagaaagaatattggagctatacatttgaagattcgttagatctgctgggtaaattacctgttattgcttccaaaatttatcgtaatgtgttcaaggatggtaaaattacttcaaccgatcctaatgctgactatggtaaaaatttggcccaacttttgggctacgaaaacaaggattttattgacttaatgagactatatttaactattcattctgatcatgaaggtggtaacgtttctgcccatactacacatttagtgggttctgccttatcttcgccatacttatctttggccgctggtttgaatggtttagctggcccattacatggtcgtgccaatcaagaagttttagaatggctatttaaattgagagaagaagtgaaaggtgactattcaaaagaaacaattgaaaagtacttgtgggatactttgaacgcagggagagttgttcctggttatggccatgcggttttgagaaaaactgatcctcgttatacggctcaacgtgaattcgcattgaaacatttcccagattacgagttatttaagttggtctccaccatttatgaagttgccccaggggttttaactaagcatggtaaaactaagaacccatggccaaatgttgattcacattccggtgttttattgcaatactatggtctaactgaggcttcgttctacactgtattgtttggtgttgccagagctattggtgtgttaccccaattaatcatcgatagggctgttggtgctccaatcgaaaggccaaaatcattctccaccgaaaaatacaaggagttggtaaagaaaatcgaaagtaagaactaaggaaaatttgatttttgattcagggtatgcgactattcaaacacgtattttcatatacgaatgagtagtttataatttatataaatatatattacataag

SEQ ID NO: 2509 - DNA, 1389 bp, Saccharomyces cerevisiae
aaacaattgcgccatacaaaacattcgtggctacaactcgatatccgtgcagatggtatatgaagcaacaccttttgatccgatcacggtcaagccaagcgataaaagacgcgttgcatatttttacgatgcagacgttgggaactatgcatatggagcaggtcacccgatgaagccgcatagaataagaatggcacattcccttattatgaattatggcttgtacaagaagatggaaatttacagagctaagccggcaacgaaacaagaaatgtgtcagttccatactgatgaatacattgattttttatcgagggttactccagataatttagaaatgtttaaaagagaaagtgtcaagtttaatgtcggagatgattgtcctgtctttgatgggctctatgagtactgtagcatatctggtggtggctctatggaaggagctgctcgtctgaatagaggcaaatgtgatgttgctgtcaactatgcgggtggtttgcatcatgcaaaaaaatcggaagcttctgggttttgttatttaaatgacatagtactgggcattattgagctactacgataccaccccagagttctgtatattgatattgatgtgcaccatggtgatggtgtagaggaagcgttttatacaacggatcgtgtcatgacatgttctttccacaaatatggtgagtttttccctggcacaggtgaactgagagatataggggtgggtgcaggaaaaaactacgcggtcaatgtgccattaagagacggtattgacgatgctacgtatagatctgtgtttgaacctgtgataaaaaaaattatggaatggtatcaaccttctgctgtcgtgttacagtgtggtggggactccttgtccggcgatcgtcttggttgctttaatctttccatggaaggccatgctaattgtgtaaactatgtgaaatcctttgggatcccaatgatggttgttggtggaggaggctatactatgagaaatgttgcaaggacatggtgctttgaaacaggtctactaaataacgttgtcttggataaagatttaccgtacaatgaatattacgaatattacggtccagattataagttaagtgttagaccttcgaatatgttcaatgtaaatactcccgaatatcttgacaaggtaatgaccaatatatttgctaatttggaaaacacaaagtatgcccctagtgttcagttgaatcacacacctagggatgccgaagatttgggtgatgttgaagaagattctgccgaggctaaagatacgaagggtggttcgcaatatgcgagggacctacatgttgagcatgacaatgaattctattgaaaaaaagagttggaagtatatacgaatataaataa

SEQ ID NO: 2510 - DNA, 3217 bp, Saccharomyces cerevisiae
tcattagaattagaacaaagaacagtagtggagagcatatatgtgtttgcataccctccaaaagaaagcgattatagtaacattaatatgaaggcatcgcttacgtttagtctctccggaatatacgccccctgtagcatttctagggatatatatctcgaatacggcgataaaaaagctgaatgtttatatgggacaattagattgcctcagtacggtccaggttgcacgcctggtaaaattgtacattgtgtcctggatgattcactgcccttctgtagcattgttgtaccttccaaactttttgggtttatgccgacacagcccactatggatttttgctattttgaacccatattagacaatgtagtacctgtactggatagcgtaacgtttctgattaatgaacaattgtactcaaaactaatggacctaccgcaagagatgcaacaaatacaatttttgcattacaaatataacatcaactccatggaaaccgtggttcattctcgagatattttaacatctggtctttgccaaattttaaactgctcacctttcccgcagggccttgttgattttacagaaacccaattgatattagtaaatgatactgagcagaaactaagtgctctaaaatatgctaacgaagatgaagaatatgcattacctaaaatagggacaaattctgctttatcaattgatcttgaatctctcccctgcacaatttcaagagatcttttgcgacctgcacctcacatcaatgatgataattcaatatatgcctttacagacgctgaaactctactgcgcctggatgtcacaagtggatcgtttataacagtgtcaaatatgggttgcgtcaggctagttaagctgtttgttttactactccccaacggctttaaaaaaagaacaatatacgcacctcccaaaataatagcaagctttccagactgcagcgtcgtgacaatatcaaagtccaatataggccatacagatattcccattgctaatcaagttttcatctcaagagttggaggctggcttcaatctcagaaatgctttcaaaatattattctaacaaccttgaaaaagttttttagcgagagcaaaaggattctttgtcaaaatgatttaatcccaatcgcttttgattcaagtatggctgatctcaatatagcagaggaaaatgatgagtctgatgacgaagatgagctagggcagtactacaagaacgattcccttgtatggttctttgtcacaagcgcagagctcgattgcttctctaaagataattctcattttattattgatcccaatcggacgaagctaataacaactaatatcactaacagaagaccattacccttgagtagatccaatcttcagagatattacggttttgctgaaactttttactatgatttgcatatcttcccctatgtaagacaattggttaacatattagaaacttccttcaattgttctcaaaggggaatcaccctaaatgcctctgtgttacttcattccactacaaacaatgtgggcaaggctacaatggtgagatttgcttcaaaatatcttggtatacatctactggagatagattgcctttcgctcacttcaaattcaagacaactggattcaacatctaagattattggttacattagggctaaatgtgaaaatgtcctaccgtacgcatcacctgctgtgatttttttggctcatttggattcaattttgcttgacgtaaacgctaatcaagatccagaggcaatcaaattacaaaaatctataaacttcgaaatgtctaaacttctggacgattttacgtttaaattcccaggaactacatttgttggctccgtaaataacatagataacgtgccttccagctttagatcacatatgagatttgagattctcgtacccgttccgtctgaagcacagagactgcgtatctttcagtggtacttatcttcacatgaactaaacagagatgttcaacaaaaggttccagtatcttacatggataatatttcattttcatcactctcttcatattctgctggtttaactcctttagacatcaaatcaattgtggaaacggcacgaatgacggctactgcgcgtttttaccaagaatcaaagaagtgtggatggcttccgcaatcaattttgatcactcaggaggatttatcaaaagctacttcgaaagctaggaacgaattctcggtttcgattggtgccccacaaatccctaacgtaacttgggatgatataggtggtattgattttgttaaaggtgaaatattggacacaatagacatgccgctaaaacatcctgaattatttacctcaggtatgaaaaagagaagcggtattcttttttatggtccaccgggtacaggtaaaactctaatggctaaggccattgcaacaaatttttctttaaatttttttagtgttaaaggccctgaactgttgaatatgtacattggtgagagtgaagctaatgtgcgcagagtgtttcaaaaggcgagagaggctaaaccttgtgtcatatttttcgatgaaatcgattcagtagcacccaaacgtggtaatcaaggtgattcgggtggtgttatggatcgtatcgtttcacagttactagcagagttagatggtatgagtaccgacgctgacggtgtatttgttatcggagcaacaaacagaccagacttattggacgaagcactactaagaccaggacgattcgataaattgttatatttaggcattccggatacggataccaaacaattgaatattttagaggctctgactcgcaaattcgtgctcgacaacgacgtaaagcttattgagttggcaaagctatgtccatttaattacaccggggcagatttttatgctctctgctcagatgcaatgcttaacgccatgtcaagaattgcacgcatggtagaaaaaaaagtttctcagcataacgaattgacgggagagaatatttctacacgtcgctggtttgataagattgcgacaaaagaggatactaaggttgtcgtaaaaatggaagacttcttgaaagcacaagagcagctcaccccaagtgtgtcgcgggctgaactgaatcattatgaagcggtgagagctaattttgaaggtgcttaagtaatatcaactcagagcgtataggtaaatttgtaaa

SEQ ID NO: 2511 - DNA, 1214 bp, Saccharomyces cerevisiae
atacaagacaaagaagccgatcttggaattcgatagaatctttttcgcaaatgaatgacaggctttcgttgacaagtctgtttcccaggtgtttgaccacatgtttgtatatttggactgcatacataacattgacaaggattcatcaaatacctaggtggtttctcgcgctaacaatagttccgacattggcagtggctctatacacttattataaggttattgctagaggtcccggttctcctctagatttccctgatttgttagtccacgatttaaaggcagcggaaaatggacttgaacttcctccggagtatatgtcaaaaaggtgtttgaccttaaaacatgatggaagatttcgggtgtgccaagtatgccatgtttggaagcccgatcgctgtcatcattgttcatcatgcgatgtttgcatattgaaaatggatcatcattgcccttggttcgctgaatgcactggttttaggaatcaaaaattttttattcaattcttaatgtacacaacattatacgcgttcttagtcctaatttatacttgctatgagcttgggacgtggtttaactccggtagtttcaaccgtgaattgatagattttcatctattaggggtggccctattggcggttgctgttttcatttctgttttagcatttacctgtttcagcatttatcaggtttgtaaaaaccaaactactatcgaggtacacggaatgagaaggtatcgaagggatcttgaaatcctcaatgacagctatggaacaaatgagcatttagagaatatatttgacttgggttcttcaatggccaactggcaagatataatgggtacatcttggttagagtggatacttcctattgagaccttcaagtacaaaaagtctaaacacacaaaggatgaaaaaggtttatattttaatgtaagacctcaagtacaagaccgactgctaagtagtagatgtttagaagatcaattactgagaagagtaacaccaagaccctcattagaagccgatagggcgtctgtagaaattatcgatgcaaattagtcataaaactagaacgaatgaatgttacgataatacgaaaattatccaagatgataaaaatttatcattacaattacaaacattatataaaaaaattatttatgcattataccaaaagaactcttagtttttatttataactttctatttgat

SEQ ID NO: 2512 - DNA, 994 bp, Saccharomyces cerevisiae
cttctgcaagacaatcaaaaaaaaaatgatgcgtcgcacgctattacattcattcgctacgctgctactttctttgtcgttgtggtcagctgcggtcatggcagctgtgacaactcaggttacagtggtaacaaatgtcgcaggggccctggttacggagaccacaatatgggaccctgccaccgctgctgctgctgctacaactaccgctcaaacaggtttcttcactacggtattcactaccactaacgatgtcggaaccaccgtcactcttactcagacagtcaacagagccactatgctaccaaccacgacgacttctacctcatctactggtaagacaaccaccactgttcctaccgcaacttcatcgttgtcttcgggactgtatttatctacagttaccacgacaaacgatttgggtaccacagttacattgactcaaacgttcacacattctagcaccagtgctacttcatccgcctcctcgtctgtgtcctcgtctgtatcttcgtctggttcatcctccagtgtaaagacgaccacatcgacagggagcgcagtagctgaaacaggcaccaggccagacccctccacagacttcacagaacctcctgtgtctgctgtcactagtctatctattgactcatacattaccatcactgaaggtacaacctccacttacacaaccacacgtgcgccaacgtccatgtgggtcactgttgttagacagggcaacactatcactgtgcaaactacttttgtccagcgtttctcctcccagtacgtaacagtcgcttctccctccgtggggtctattgggatgggtactttaaccggtactgtaggcgttattaaatctgcaataaagaaaacagtttcgcataatgaggcccagcatctaggtatgagttcgtttacttcaattttgggtgggctattaacggttttaatttggttcttataaatttttattcagaaataaacacaaaca

SEQ ID NO: 2513 - DNA, 1023 bp, Saccharomyces cerevisiae
aagaataactatgtggagactaaccagaaaaatcggcactagaatccatatttctaatcagctgtcgcccatttttaacaaggcaattggaacagttcctgtttttcgtttttattcttccagcccagagcagaagtatagaaagaaacttttggaagaggctcaaaaacaaggttttaacagcatagaagagttgaaaaatcatttgaaagagactatagagtctaagaagcgggaatttaataaaatcgaccccctgaaagaactagaggattaccaacaaaaaactcaaatggaaaataacaactccaagcatttgatgacgaaatcaagaagtcctctcgatccaagtgctcctaaagttcccttcaaaacattggactcttttttggatgttggaaaactgaaggacttatcgaaacaggaagtagagtttctttggagagcaagatgggcacaaaaagataatacattatgcgctgtgattcctgtctccgtttatgataagatgatggcaaatgccaggaataaccctatattcgtgttgccacttcctagacaagttcaatctgaggatgcaaaaccgaacgaagaacagggaatggaactacactacatccaatggcagtttgtcggaccccaaacaacacattgtatgatgacttccctagcagaatacaaactacaccaggaatttgcaaggccacatactaccttgcagttccattctgatttggtcaaggataagggaattgtttttatgaatggccatgttgaaccggatacaaacgtgaatgtacaggatgcacagctgttattgctaaacgtgcaaaggttttatggtgcaatgggtgaagaaactccagttgctaaacagagagtgcagttgttaagagatttctctaaggcctctccgggattcaccgtcgagaaattgatttcgctatcacagtccatggaaaattaacgaagaattacttccgtatacgtatatatatatatatatatatattaatgacacct

SEQ ID NO: 2514 - DNA, 2782 bp, Saccharomyces cerevisiae
gcaaaattatggagacgttattgcatgcaaaattattgctgtctgcagaagtagaatctctgaaaagtggttctttcgaccagacatatgtgaaaaaggctgaacatatcatcagtggtgaatcataccagctagtacagcaatttgtggacaaatttaagggaaaaattagtatttcgggagaaatatccacatctagtgttattgctgctctaaatgactttcttaacgttgaggttttcaaaatgggccaagaaaatgagatgctatttttggctattgccctcttacagacctttattcaaaataactacaccggcccagcagctaggttgaaagcaatctcaggtttgtttggcaaaactggaattgaaataggagcagttaatacagccctttcccgctcattagccattatgggccagcctgcctacgaatttatggatgatccattgtatttggttttatcactattattacttgaaaggataaccggccaaaaaagcttatttgatgttaccccggatcaagaaattccgctacctattatctctgctgagtctactcctggattattagctgtagcttattggtggtgggcaagagctcttttgacgcaattgtcactgattccagaaccttctgggttccaagctagtgttgcatctgcaatatatcagtctgctgaccttgcatatgcgataactaaggaattaccggagagtattcacgaagatttcaaaagagaactttgtgcaatgtactatctagagaatgtcaaatgttcattggccatcaacacagaacatttgtgcctgccatccttgaccagagcgaaaaagataacaaattttgaatttgtaatgacgggtgcacgcgctactagaactaaatatcagcaaaaggctcatgccggtttgatcattcttgccaaatccttcacatttcaaaattttgctttgagaacgacatctgctacaccagaaacatttgctttagagtccgatctattattggagaagcctcattttgagtccattgctgatgaacctctagacgagcaaatttatagtaaaagacaaaaggtagacctaaatgaaggttatgaagaagataaactattgccattggcactacgtcaagaaaatattccaaagttgttgctggatttgaaccctaacgatcaacctaccctatctgattacgacaacatccagttgctgttacgtctttacaccataaagaacacaactccggccaaggatcctcttgtggaagaagaacttactgctttgctttctagaatattatatcaaaacggtgacaaaaattggtctattttcgcccgatcattatgggaaaggtcaattattgagacaacaaaggctaaaactattgaaagaggacttttacaaatgcaatccctcgtagaagaattggatttgaagattaagagtaaattggttccaagttcaagcgaaatcaatgttgctagcaggctgtcatacatccaccagctgccgttcatccctaggtggcaattggatgccaccttagctgaaaaatatatgtcgctgggtattttgaagtccgctgtggaaatttatgaaagacttggtatggcatgcgagactgcattatgttatgccgctgttggagatgaaaaaaaggcagaagaaatccttcttcaaagaataaatgaaaatgattcggatgccagggcttactccattttgggtgatataaaacaggatccatccctatgggaaaaaagttgggagattggaaaatacgtcaacgcaaaaaattcccttgcaaagtattactttaatcctcctccaaagtctggagcacaaccaaattactctgctaccttgaaacatttaaatgactcgttaaggcaatacccattaagctttgaaacgtggtatttttatggttgcgttggattacaatgtggtaaaatgcagatagctgcggaggcatttaccagatgtgtttcattagacccttatcatgctctttcatggtcaaatttgagcgctgcatatacgaaaatggataaattgaaagaagcttatagttgtttgaaaagagccatttcatgtgacgctcaaaagaactggaaaatttgggagaattacatgcttgttgctgttaagttgaatgagtgggaggatgtcttaactgcatgtaaacaattagtcagtattaggagggacaaatctggcgaaggttccatcgacttaccaattattgaaaaactagtagaactattagtgactagtgaatatccagaggagccgcagcaattatcttattttcaaaagagctgtactgagtttatctgtaacactttacctcaggtaattacaaccagtgcaagatgttggcgactggtcgcaagagtagaactttggaggaagagaccatgggccgccctagaatgccacgagaaggcttatagggccatttctcacaatcctgatttagaagttgaagaaaaggtttggaatgatacagtggatgcttgtgaagatttggtggctgcctatgaatcacttggtgaaatggaaggtaaatatgggccaggcagtctggtttgcaaagactggaaatacaaatgtagatctactatcaaagctctaatgagtaaaggcaaaggcagatgggatgactctcctggttgggataggctagtggaagcaagaagccaaatatgaagagcacctttcatgtataatctgtgtatattacgtaatgtttgtataaatagatacat

SEQ ID NO: 2515 - DNA, 603 bp, Saccharomyces cerevisiae
aactggaatatcaagagactgaacatgattccgaggactagaacactactgcaaagtaaaataccaattaccaggtactttgccagatgttgggcgcctcgcgtacgctacaacgtgtgccgtactctacccgcagcagcgttgcataccaatatcatcgcacataatgaagtgaaaaaggacgataagaaggttcatttggggtcttttaaggtagacaagcctaagatgatgatagctttcacctgcaagaaatgtaacacccgatcttcacacacaatgtccaagcaggcgtacgagaaaggtactgtcttgatctcttgtccgcactgcaaagtgagacatttgatagcagaccatctgaaaatattccatgatcatcatgttaccgtggaacagttaatgaaagctaacggagaacaagttagccaagacgtgggcgacttggagtttgaagacatcccagattcgctaaaggacgtcctgggaaaatatgccaagaacaactcagaaaatgcatcccagctccctcacccttcccagaaatgaatgaagagctcatgcacaggcatgtacatagatagatatataaccgttaaatag

SEQ ID NO: 2516 - DNA, 1617 bp, Saccharomyces cerevisiae
cgacatagatttcgcaagtgagtgccattgtgtcgtgttagtagtgtgggcaggcccgtaacgtgtttattgataggagttaagcccaagactacagagttctttgcttcatctttcaattttctttttattttccgaaacccccactccatcacattctagtacatatgtctacggaagagcagaatggtgttcctctgcaaaggggatctgaattcattgcagacgatgtaacctcgaataaatcgaacaacacgaggcggatgctggtgaaagagtacaggaaaatcggtagaggtgcctttgggactgttgtacaagcatatttaacccaggataagaaaaactggttgggcccctttgcaattaaaaaagtccctgctcataccgagtacaagtccagggaattacagattctgaggattgccgaccatccaaatatcgttaaattgcagtatttctttactcatttgtccccgcaagataataaagtttatcaacaccttgccatggaatgcttaccagaaactctacaaatcgagattaatcgttatgtgacaaacaagctagaaatgccattaaaacatatcaggctatacacttatcagattgcccgcgggatgctttatttacacggtcttggcgtttgtcatcgtgatatcaaaccatccaatgttcttgtagacccggaaaccggtgtcttgaaaatctgcgattttgggtctgccaaaaaattggaacataaccagccttcaattagttacatctgttcaagattttatagagcgcctgaattgatcattggttgtacccaatataccacccagatcgatatatgggggcttggttgtgtcatgggcgagatgcttatcggcaaagccatatttcaaggtcaagaaccccttctacagctaagggaaattgctaaattgttaggtcctcccgataaaagattcattttcttttcgaatccggcctacgatggccctctattttccaaaccactgttctcgggctcttcgcaacagaggtttgagaagtattttggccattccggtccagatggtatcgatcttttgatgaaaatattggtctacgaaccacaacaaagactgtctccaagaagaatccttgcccatcagttctttaatgaattaaggaatgatgacactttcttaccaagaggtttcactgaaccaatcaagctaccaaatttgtttgattttaatgattttgagttacaaattctgggtgaatttgctgataaaattaaacctacgaaagttgctgaataataattttctattaatttgttctctttcccctcggaaaatttaatgaacaaaatactatgatttttttcacctttgatccgctgtttatatttcacttggaaaagaaaaaaaattttttggaataaaatatattcaaatttccatttgatattatcatacacttcttttatccagtcactccttcaatttcttctttattttttattttatgttcctaattttttttttatctctttcctatttcctgttcttttattaatctgaaatattattattactttagtgttagtttataattttaattaggcctacgtggcttgta

SEQ ID NO: 2517 - DNA, 994 bp, Saccharomyces cerevisiae
cagcaaataaaaggatatagaatcaagttaatatgtcaggtcctccacctccttacgaagagcaaagctcacatctttacggccagcctgcgagcagccaggatggaaacgctttcatcccggaagactttaaatattccacggtggttatctcgtgcgaacccatcattcgccagcggtttatgcacaaggtttactctctgctgtcatgccagttactggccagtttgtcgttctgctactgggctagcgtttccacttctttgcagaactttatcatgtcgcatatcgccctcttctacatctgcatggtggtatcgctagtatcgtgcatttggctggcagtaagtcctcgtcccgaagactacgaggccagtgttcccgaaccgttgctcacgggcagcagcgaagagccggcacaagagcaaaggcgtctgccttggtacgtcttgtcctcgtacaagcaaaagctcacgctgctctccattttcactctttccgaggcttactgtctgtcgctggtaaccttagcgtacgataaggatacagtactttcggctctgctgatcaccaccatcgtcgtagtcggcgtttccttgaccgcactatcagagagattcgagaacgtgctgaattccgcaacgtcaatatactattggttaaactggggtctatggattatgatcggaatgggtctcacggccttgcttttcggctggaatacccactcttccaagtttaatctgctttacggctggcttggtgccattttatttaccgcgtatcttttcatcgatacgcaactgatttttaggaaagtgtatcctgatgaagaagttagatgcgccatgatgctttacctggacatcgtcaatttgtttttgtctattttaaggattttggccaactctaacgacgacaattaaaaaaagggaaaaatcgaattatttacacgaatatatatatatttcttcttcttttacatagtttataa

SEQ ID NO: 2518 - DNA, 545 bp, Saccharomyces cerevisiae
ccaaagataataaagatggcaggtgtttccgttagagacgttgcagctcaagatttcatcaatgcttacgcttctttcttgcaaagacaaggtaaattagaagtcccaggttacgttgacattgtcaagacctcttctggtaatgaaatgccaccacaagacgctgaaggttggttctacaagcgtgctgcctccgttgctagacacatttacatgagaaagcaagtcggtgttggtaagttgaacaaattgtacggtggtgccaagagcagaggtgtcagaccatacaagcacattgatgcttccggttctatcaacagaaaggtcttgcaagctttggaaaaaatcggtattgtcgaaatctctccaaagggtggtagaagaatctctgaaaacggtcaaagagatttggatcgtattgccgctcaaactttggaagaagacgaataagcgagttgttaaaaataaaaagctaagatttttattaatattatcattatactatagtattatcgtttaactcaaacaaaattgattttaaataa

SEQ ID NO: 2519 - DNA, 729 bp, Saccharomyces cerevisiae
agaaaaaatcaattagaagaaaacaaaaaacaaaatgggtattgatcacacttccaagcaacacaaaagatccggtcatagaaccgctccaaaatccgataacgtctatttgaaattattggtcaaactatacactttcctagctcgtcgtactgatgctccattcaacaaggttgttttgaaggctttgttcttgtctaagatcaacagaccacctgtttcagtctccagaattgctagagctttgaagcaagaaggtgctgccaacaagactgttgtcgttgttggtaccgttactgacgatgccaggatcttcgaattcccaaagaccactgttgctgctttgagattcactgctggtgccagagccaagatcgttaaggctggcggtgaatgtatcactttagatcaattagctgtcagagctcctaagggtcaaaacactttgatcttgagaggtccaagaaactccagagaagcggtcagacacttcggtatgggtccacacaagggtaaggctccaagaatcttgtccaccggtagaaagttcgaaagagctagaggtagaagaagatctaagggtttcaaggtgtaatctagtatggtttgaaaccttacaatttttcttctttgttcctttttccttgtttcagtgtatattaggttgggaaagagggatttttccataccatatgactgactacaatatatacatgtataataacttca

SEQ ID NO: 2520 - DNA, 1910 bp, Saccharomyces cerevisiae
acccacatcgtttagttacaagaaagacaaaagactggtactacagattcggtgtcctttacctgttttcttctttcctgtgcgcacttaatcagtcattttagactatcgtttttagtagcacataaggaggaagacactcgatgaatagtcgattctgcaaacatgaacttgtggagacatagtccagaagaattggctgcttacaatagctgtcatccaatgaagctaggttcaggggtgctgatacaattgcctctttatgacaattcggcagtatatgcagaagatattacttttaggagtttctgctgtgaaagagtgcccgtttatgtatctacggtgctaagaaactcttccccatataggtatcttgatgaggtgatcaatgactggcaaaaattcattcaagtaagcgattatgtcggcggttctgctgagtatgcgatttatgctgtgattttgtcgataacttctaattttgtcatcacagtgttcctgactgtgatatgctgtataaatatcagcgggcgcgcatataagagaattctacaactactgaggatagcctcgttgttagcctcgttgaacttaacgatttttatcacgaaggtgttgcggagattggaaaaagagcacaatgtctatggtgtcgttcgggctcattccattatgcacatcttttccgatgatatgacatttgttgtcttggatttcttggctactttaatgttccaattttgccaagtcggcattgtcattaggctatttcaaagagctcaggaaaagagaataattttttttattggggtgatattaacaataaccgcaaatattttatgggtaattccaccgtttgctaaccatactacaaaacacagaaatgactggcagattctgcggccatttgtttaccttttccgtattgccatcgccacgtcatatgcatcaatcgtcatttatcacatctggcagaaaaaaaaattgtggtttaaattcaatcaaatgggtttacttacgctattgactattcttgtggtgcttctattaccgggtttcttccttgccgatgtgtcgaacttatggatatcggaactgggtgaagtgtttaacacgacatgctatgtcacttcgaccgtgatcacatgggagtggctggatagattaaatgttttggaaagaaaagaggaagcgcaaagcattttgggaagacctatcttcgaggaagagcaacaagactatcggtttgccaagtacgccttaagggttcaaaacgctttaaccaggagggaatctcaggacgcatcaacggatcggcacgatacgtcaagtaattcggaagtatgtgatttacagaccatatcacgctacgacccagaagatcagatatcagtgggcagaagcattgatcgaatgcatttcaatgataggggaacttataaagatgtagcgctgaagaaattaggctatgcgcgtgataaaattttatactttacagaccaaatcgtccagaaaagcgtaggccacaataatagcagcagctcgaaaaatgaaaaaaccaaacagagaaaggccatggtcaggaaacggttgggattagacaaaccaggcatatacatttattcgacaaaggatgtcgttttcaattcagatgaagatgacgatgagaacgcggaagatgaagatgacgatgaatatgaagttggcagtgaaggcaataacaatagctctgccacttttaccagcgaccatataggccatatttgaaggacacagcagaaacagtattacaacaaacctacatatttatatattccatgcatgctcaagatgcatatgcataatatttacacgaattgcgaatatgtcacataatagagcagtggataagtactcaatgcaaaatcact

SEQ ID NO: 2521 - DNA, 1954 bp, Saccharomyces cerevisiae
accgcaatagtaactctacaagtaaacgtgttgttttctcaagaacaggttactgaaactgagccattggttgcggaaaatttccctaataatttcgaccggctgacgtaccgttttggctatttctcaaatacttgactggcttaactgccatactgaattgcagtaaaacccgtaacactacaatttctgtccagcggcagtattatttctaaggatgatagtgtggcaagcactattcgtggtttactgcctatttaccacttctattcacggtttattccaagacttcaatcctttcgcaaataagaatatttccttaaagtttcccagcctaaatagatgggagaaaaacgttatggctactggtcaacaaacaatcatcaattcggatagcatttatgaatggaccccgatcttatctaacataacagcgggcaaaaaagacagttttgtatttaccattgacgcagaagcctccggttatgggtttgctcccacgtatgaagtgttaatgtttattagcggcaatatatgccaaatgcccatgaatagatcagatgtggatttaacaatatactactcttttaatgaaacggttttagagaacccaaatataggtcaaagtgcagtttttcaggatggctacatccaagcattagccatcagtccagtgcagtcttctagctcgaacgctacctccacgtattcaaatctttatgtggtcgctgagctagtgaattccactacggagcaacctctgtccagttccgacgcctctgaaaattgggaatatagactgagtatctctgagaacgatttggtttttcagtgggatgtaaggccttgggtagaggtcctggacactgatatgaattctgcattactatcaacggggaatgtcaccgcagacgccaaagtttatcacaattattcaatatatgatccatccttgtacgatctgtatgtttactcgtacgaagattctgttcaactaaaccaaaactataatttatctctttgtgctgtgaaaaatggaccatatttagtgtcttcccaaaatacatcaaatgcaacagttacgtcaaatagtacaaatcctttagagcgtactgacttggcgattcaaaaaaaaattacagaatatggtggtagcgtgacagaaatgttttacgtgacaggactgaatgcctcaacaacttatgtagcgtacctgacaaagaaaatcagtaatggtgatgggttgtcaagtgtgggcggcattttattttcacatgtttattttaccacaagaagtaccgatgtctgctctttgatctttggtttggacttctgcagtgacgtcgcttactctgttcctacatcctcattttctgtgggtaataaaactctcatggcgcagacatatgaccacattgcagaggcactatatgcaaattttagcaaagctctacagttaatatcctgtgacgcagacaaagacgcaagatattctccggtcatgacttgtgacgattgtgccgaagcttatcgtgattgggtatgtgcagtatcaattccgagatgcaccacgacgtcttcccaatactacatccacagagataaaagtcacaaccgtaatgattatttgaataaatttattaaacctttggatgactattacgaaattctaccttgtattgacatgtgctatacattagtacgaaattgcccaagcgattttcaattttcctgtccgaatgatcttactacggaagatcttctttatcaaagttacaatttctatatggacactgactactcaacctgtaattatataggtaactcatccttgatggtaattcatccattggacgatacgtagaagagaccgaactatcacaaaaaaattgaacgatttaaatgcataagtacatcgattttttttaaatcatatatacacataaaaaaatag

SEQ ID NO: 2522 - DNA, 969 bp, Saccharomyces cerevisiae
atgaaagcggaaaggcaaacaggattaagaaatagttttacaaccgtaatcggtcgcaaactaataaacacttttgttccgtccatgatgttaactagcgtagctggtaacgatatttttttccgaggtttattcaaatcgccggtattagcatttcaaagttatcgttatgtttcgattttgggacaattgaaaccgtcagatggttctacaaagtctttcaaaagacttgggcgtggtccttccagcggtttaggtaagacatcagggcgtggtcaaaagggtcaaaaggcgcgtggtaaagtaaaatcgtggtttgaaggtggtcaaactccaatttacaagctatttcctaaaattggatttaccaacgttggcgccaaaccattaaaggaattaaacttgaaacgcattcaatggtttcatgataaaaataggcttcatttgcaaccaggcgaggttttagacatgaataagatgagaaagcttggtctggtaactggtcccataaagtacggagttaaaattctagccagcggaaagttccactacaatctaccgattgctttggaggcttctagagcatccgctaaggctattgcggctattgaaaaagcaggaggtaagtttacagctcgttactacacaccgttgggtctaagggcacatctcaacccccagtggtttcttgagaagaggggaagagtaccactacaggctagacccacgaaaagaagggatattgatttctatagtaaagaagagaaaagaggttacctagtaatggaaaaagataaactcttacaagatatcaaagaagctcaaaataagggttctagacactttttaaaacagaatgtaaaaaagagctcattagaaatagagctagaagaactgtctccagagaaggattgggtgccagttgtgtctaattctaaagtcatgaacatcaaggctttggaccactaa

SEQ ID NO: 2523 - DNA, 1619 bp, Saccharomyces cerevisiae
atttttacagactttctggtttctaattgtttcttctttgaatttctttttgaccaacagcattatagaagtggaatatgcacctagatctcatacacaagtccttcatcttagtgtggctcatatatatacgagccgcgttggctgaccaattcacatataaagcttgctattcagctagtgatatacgaaaattggggttgacttacaagggtgtttacgagtatcaatcagtttcctactgtcaaaatgaatgccctggtcaggctgtcgttgctcttttcaacggtacaggttgctactgtggtggttccgtagctcagttacagtctttgacgcaggtagattcgagcaaatgtgatgtttcgtgtgctggctggccctaccaaaattgtggtggttcttctgccatgaacgtttatatcaataacgctgcttctaccgcggactcaacttcatctactgctacctcaacatcgacaacatcttcatcaagcacaagtgttagttcaaaaacgtccacgaaattggacacgaaaacttcaactagttcttctgctacgcactcatcctcttcctcgtctacaacctccactaccacttcctcttcagagacaactacttcctcctcttcttcatcctcttcctcttctacgtctactacttctactacttctactacctctagtactacttctacttcttcttctccttccaccacttcctctagcacttctgcctcttccagttcagaaacgtcctctacgcaggcaacttcttcatccaccacatcgacctcatcctcaacttcgacagcaacggtcacttctaccccctcatcgacttcaataggtacttccacgcattacactacccgtgtggtgacgcagtccgtggtttctcaagctaaccaacaagcaagcacgatctttaccaccaggacctctgtttatgcaacagtatcgtctacgtcctcctctactagttctctcttaaacgggaaatcgagctcgtccaagagcaaaggcttgagtggtggcgccatcgcaggtgtcgtagtaggtgtggtttgtggtacagttgccttgttggctctggcgttattctttttcgtatggaaaaaacgtcgccaatcttctcagcatgtggacttggaagagacaaagcagtaccagccgtactcactgggtgatgctgacgctaaccctgttattccaccgtctgcttcgagcactaactggcacataccctctaggaataatacagcattgtccaagaatacagcgtctacttttgccacttatgatctgccgacaagggcgccgggcggcagagattctattattactggtgatgcacataatatcagcaaaagaagtcactttccctcggtagtgtacgaggagcctccttcgatctataacgggaaccaaaggttcagtgctacttcgctgcccgatatgatggaagaaagacaactacacattgtcaaccccgataatgtgagttcaaatattgggagtaatgtctcagatggtgatgatgattacgatgatgcaaaggattccaataatagttctttgcgctgactaggtttagataccaacactacatattca

SEQ ID NO: 2524 - DNA, 1474 bp, Saccharomyces cerevisiae
ttgcgcaattgcttatcagatagaccttgtaaacagcataggagtaaagacaaattcggtgtagagaataaaaggatggtatcagctttgaatcccagaactacagagtttgaatttggtgggctgattggtgccttaggcatcagcatagggctgcctgttttcactatcatcttgaatcaaatgataaggcccgattattttattaagggatttttccagaatttcgatatagttgagctttggaacggtatcaagccattgcgctactatctgggcaatcgtgaattatggactgtctattgcctgtggtatggaatactggcagttttggacgtcattttaccgggcagagtcatgaagggtgttcagttaagggatggttcgaagctttcgtataagatcaatggaattgccatgtctacaactttggtcttagttttggctatcagatggaaattgactgatggacaattgcctgaattgcaatatctgtatgaaaatcacgttagtttatgcataatatctattttgttttcgttctttttggcgacgtactgctatgttgccagcttcataccattgatcttcaagaaaaatggtaatggcaaaagggaaaagatcttagcactaggtggaaattcaggaaacatcatttacgattggtttattggtagagaactgaaccctcgtctcggcccattagatatcaagatgttttcagagttgagacccggcatgttgttatggttactgatcaatctttcctgtctgcatcaccattacctgaagactggtaaaatcaacgatgcattggtcttggttaatttcttgcaaggattttacattttcgatggagtactaaacgaggaaggtgtattaaccatgatggatatcactacagatgggtttggtttcatgctagcgtttggtgacttaagtttagttccattcacctactcattacaagcgcgttacttgagtgtttcccctgtggaattgggatgggtgaaagttgtcggtatattagccataatgtttttgggtttccacatcttccactcggcaaataagcaaaaatctgagtttagacaaggtaaattagaaaatctaaaaagtattcagacaaagcgtggtacaaagttattatgtgacgggtggtgggctaaatcacagcatatcaattactttggcgattggctgatttcattaagttggtgtttggccacctggttccaaactcccttgacatattactactcgttgtacttcgccacgttgttattacaccgtcaacaacgtgatgagcacaagtgccgcctgaaatatggcgaaaattgggaagaatacgaaagaaaagttccttacaagatcattccatatgtttattaagtttttctaccactgctattttcttcattatctatgtatgtgtgtatacatgttatgtattgggtgagtatgaggaagaaga

SEQ ID NO: 2525 - DNA, 1176 bp, Saccharomyces cerevisiae
ttccagctaatcaatcagaactagtcaacatagaagatagataagagaatacgacaactaaaaatggctccgtcaatgattccgttcactatcaagcttaaaacatgcctgaaaatgtgtattcaaaggttaagatatgctcaagaaaagcaacaggcgattgcaaagcagtctcgaagacaggttgcacaactgttactgacaaataaagaacagaaggcgcattatcgtgtggagacgctaattcatgacgatattcatattgagctactagagatattggaactatattgtgaattactactggctagagtgcaggtaataaacgatatctccaccgaggaacagcttgtcaaagagcatatggatgatggtattaacgaagctatcagatccctaatctatgcgattcttttcgttgatgaagtcaaagaacttagccaattgaaagatttgatggcctggaaaataaacgttgagtttgttaatggagtaatagcagatcatatcgatgtccctgaaaagattataaaaaaatgctctccctcagttccaaaagaagaactagttgatctttatttgaaggaaatcgcgaaaacatacgatgtgccatatagtaagctggagaattccttatcttcgtcgtcttctaacatttcttcagactttagtgacccctcgggagatatcgaggataatgacgaagaaaagcctattttagccttagataatgacgataatgacaatgcagatgctaaacaccctatcactgttaaaaagcctaggcagaatagtgaaaatatcaagaacgagctcaagattccgaaagatatcaaaaaggaagtgatcgaaaagaaacaatcagaaaagaaaactacaaaaagaaagactaagaaggagcaagaaaatgatgaactagatgagttgaagaaacggtttgacgctttacgcagaaaataagataataatttatatgtatggttaattaaccacatatttattttactctcattcttttaccttgctttttctgagtcagctgctctattattctcggcaataaataaatatatgtatattccttttactaaaattccaatttttttgttctccggacatttgcaaattgtttttccagttctgtcacagctattttccttctcagctatatatacc

SEQ ID NO: 2526 - DNA, 1231 bp, Saccharomyces cerevisiae
tgaaaaatcacacaaagaaagcacaagaagaagaacaaaaatgggtcttttttcaagaaaacgggaccatacgcctgctgtgcctaaagagaaacttattccatgtgataagatattcttggaccctcctgccaagtatggtaacgcacctctactggaacccatctccgaagatcaaaacgaaaaatatagagctgtcttacgacattttcaagatgatgatctgaaattaccagaaaatctcaatgaccttgacaatgggacacatgccaatgacagacccttgagtgattgggagaagttttggctttctagggagtgttttctaagatacctaagagccaataaatggaacaccgcgaacgccataaaaggtctcaccaaaaccttggtatggaggagagaaattggacttacacatggtaaggaggacaaagaccctttaacagctgacaaagttgccgttgagaacgaaactggtaaacaggttattttgggctttgacaacgctaaaagacctctatactacatgaaaaatggtcgtcaaaacacagaatcttcctttagacaagtccaagaattagtctacatgatggaaactgcgacaactgtagctccccaaggtgtagaaaagatcacagtcttggtagatttcaaaagttataaagaacctggtattatcactgataaagctccacccatctctattgctaggatgtgtttgaacgtcatgcaagatcattaccctgaaaggttagctaagtgtgtcctgatcaatatcccatggtttgcgtgggcttttttgaagatgatgtatccgttccttgaccctgccactaaggcgaaggctatctttgacgaaccatttgaaaaccacatagagccatctcaactagatgctctatacaatggtctgttagacttcaagtataaacatgaagtctattggccagatatggttaagaaagttgacgatttacgattgaaacgttttgatagatttttaaagtttggaggcattgtcggattaagtgaatatgacaccaagggccaacatgacgaattaaaatatcctgttgatatggtcatttgataaactataattaagatttttttttttaacgtttcccgctacacaaacgtatatatctagactcagatgtacgtttataatggctgcttatgcgcttatcgcattttatatacttttagaatcaactgaatcggctat

SEQ ID NO: 2527 - DNA, 1193 bp, Saccharomyces cerevisiae
gcatatccgagactctgtatcaagatccatattgcacaccagagctgttgttttatactacaactcatctttttgacttttcgattgtaagacctcgctactgagtatcaatagcagaaaacgaaaaccaaaggcccataccaagatgtcttataatccgtacgcatatgcaacaagtgagcagaatggcgttaacgatcgcttttcccacactccacaacagcaacgaccaatgcaaattccgaggaacacgcccgtgaatggccaaggtaatgcgaatatgaatgcaaacgtaaatggcagtggcggtggttttccattccaagatcctcgtggttcgatggcattccaactagggcagagcgcattttctaattttattggtcaggataactttaaccagtttcaagaaacggtcaataaagccactgcaaacgctgccggctctcaacaaatttcaacgtattttcaagtcagcacccgttatgtcatcaataaattgaaactcatcctagttccttttcttaacggaaccaagaactggcaacgaattatggactctggcaactttttgccaccaagggatgacgtgaactccccagacatgtacatgcctattatgggactagttacctatattctcatctggaatacgcagcaaggtctgaagggttcattcaaccccgaagacttgtactacaaactgtcttctactctggcgtttgtgtgtttagatttgttgattttgaagcttggcttgtatcttttgatcgattctaagattccaagcttcagtttggtcgaactgttgtgctatgtcggctacaaatttgttccattgattctcgcccagcttttgaccaacgtgaccatgccatttaacctgaatattttgataaaattttacttatttattgcctttggcgtattcctactaagatccgtcaagttcaatttactaagccgctccggtgctgaagacgatgatatacacgtttccatcagcaaatcgaccgtcaagaagtgcaattacttcctattcgtctatggcttcatttggcaaaatgttctaatgtggttaatgggttgatcttgattgaagagatcaaagagaggatttaatttcatgcgcattattattatctacggtcaatttgttaaatacttatatacttttattcctacgtcataaa

SEQ ID NO: 2528 - DNA, 323 bp, Saccharomyces cerevisiae
atttccaacgacacaagagagaactagcgcaaaagatggcagagataaaacattatcaattcaatgtcgtcatgacctgctcgggatgttctggtgcagtcaataaagttttgacgaaattagaaccagacgtttccaaaatagatatatcccttgaaaagcaattagtagatgtatatactacacttccttacgattttattttagaaaagattaagaaaaccggaaaggaagttagatctggcaaacaattgtgaatgaaagtgaagagaaatagttttttactctattttgtattgtagctacttaagtaaatgattaat

SEQ ID NO: 2529 - DNA, 735 bp, Saccharomyces cerevisiae
agaatacgaaaaagatgtctcaaaaagcttgttacgtttgcggtaagattggccatttggcagaagactgtgattctgaaagactatgttacaactgtaacaaacccggtcacgttcaaacggattgtaccatgccaagaacagttgaattcaagcaatgttacaattgtggtgaaaccggtcacgttagaagtgaatgtactgtgcaacgttgtttcaactgtaaccaaaccggccacatctccagagaatgccctgaaccaaagaagaccagcagattctccaaagtttcatgttataaatgtggtggtccaaaccatatggctaaggactgtatgaaagaggacggaattagtggattgaaatgttacacttgtggtcaagctggccacatgtccagggactgtcaaaatgacaggctttgttacaactgtaacgaaactggccatatttccaaggattgtccaaaggcttaggtgaaacatccactgaaaaaaacaaaggaacaatcacttatcatgctatatttcatagaggggaaaaaagaagcacaagtaaactgaatatttaagtttattttctatatcttttctatacttcatttcacttgtttcctcccttggttatttttaacgattctttattatgaaacaggaaaaaaaattattacaaaacagaattacatatttaatctatataactaacctttattccaaacctttataaatagcatct

SEQ ID NO: 2530 - DNA, 2041 bp, Saccharomyces cerevisiae
ttgtatcgttttcgtatcgtatcgcatcgtattatcgtattgtacacaactaactcaccaatcaaggctcttcttacaattagttacgttaccgtatccattgctacaacctataatttcaagcaaaagaaaaatatactattgtctatttttttgtattgtagttttctctgattacacattttttctagtacttttctccaagcacgagttacaggaaaggaaccggaaagcaacaaacatactaaacatcccataatgcagcaggacgacgattttcaaaattttgtagctaccttggaatcattcaaagatttgaaatctggtatttcaggttctcgtattaagaaactaaccacttacgcacttgatcacattgatattgaatcgaaaatcatatctttgataatagactactcaagactttgtcccgattctcataaattaggttctttatatatcatcgattcaataggtagagcttacttggatgaaacaagatcaaattcaaacagcagcagcaacaaacccggtacttgtgcccatgccataaacacgttgggcgaagtaattcaagaactgctatccgatgctattgcaaaaagtaatcaagaccacaaggaaaaaattcgtatgcttttagacatttgggacaggtccggcttgtttcaaaagagttacttgaacgccatcaggtcaaaatgctttgctatggacatatcgaataacaccgcgaacaccgcttcacaacaactatcactggatcccaagcagaggtcgaaacaaatcttgtcaaatctaaagaaaagtcctcctttaaacttgaacataagtcttccaactgatttgacttccacagatccagccaaacagcaagcagctcttttccaagtaatagcggctctgcagaaacattttaaaactttgccttcacatacatccgtgggtacagtcgcacctccccaagcccatacaattaccgaatatggtagcagacgtgaacgtgaacgtgaaagagaaagatataactcaagaaggaatagatcaagatctcctccggcaccattttctcagccatcgacaggcaggaaggaccgctatccatctgtggcccaggaccaatacagcataggcgcccccaatacgacatttggcacaaacaatcaccacttataccccgatgagcttaatgtttccaataatcctcattatagaccaaaaccagtaagttacgactctacattgccaccagatcatattaaagtctacagccgtactcttttcatcggtggggtaccactaaacatgaaggaatgggaccttgctaacgttttaaaaccttttgctgaagtacaaagcgtcattctgaataactccagaaaacacgcttttgtgaaagtttattcaagacatgaggccgaaaatgttttgcaaaacttcaataaagatggagccctgccattgagaactaggtggggagttggttttggtccaagagattgttgtgactatcaacacggttacagtattattcctatgcacaggctcacggacgctgataaaaaatggtcagtaagtgcgcaatggggtggcacttctggtcaacctctcgttaccggtattgttttcgaagaaccggatattatcgttggtgaaggtgtttcttccaaggcaatatctcaaaagatgcctactgattctggcagaaatgggccacgttctggtaaacctaacaaatctggtagcatatcgtcgatatctccagtaccctacggcaatgcaccattggcatctcctccaccacagcaatatgtgcaacctatgatgcagcaaccgtatggttatgcccccaaccaaccattaccttctcagggacctgccgcagcggctccccctgtacctcagcaacaatttgaccccactgctcaattgaattctttgatgaatatgcttaaccaacagcagcagcaacaacaacaaagctaagatctttactccaccctttatttgctcatagtacataaaactaatctacctctat

SEQ ID NO: 2531 - DNA, 1483 bp, Saccharomyces cerevisiae
ctattgcagtcgttatcaaccttttgcactttatctagtaatgtccgtgaaaaggtctgtttctgaaatcgaaattgaaagtgttcaagatcaaccctctgttgccgtgggaagtttcttcaagggcttccgtgctcccagtgacactacgttcgacttatacaaaaaaaagaagtctgaaaaggacgaattcgtattacacggtgaaaacgagagactagaatacgaaggttatactgattcttcttcccaagcttcgaaccagtatgttgtgggcctatttaatccagaaaagaaaagtattcaactctacaaggctcccgtacttgtttccaaagttgtatccaagtcaagcaagaatctaaggggtccaaaaataaaaagtaagagtgatactcgtccatctgctttgagaaatgcgttgggtgaagcgtttggtactaaaaaggctaaaaaagctattgcagatctagaaagaaaccgtattgactctgataagttgactgattctgctattgacattgtggattccgtgagaactgcatctaaggatttaccaactcgggctcaattggatgaaattacttccaacgatagacctactccattagccaatatcgatgccactgatgtagaacaaatttacccaattgaaagtataataccaaagaaggaattacagtttattcgcgtttcatcaattctgaaagaagcggataaggaaaagaagttggaattgttcccataccaaaacaattccaagtatgtggcaaagaaattggactctttgacacaaccttcacaaatgaccaaattacagctactatactacttatcactattactgggcgtatacgaaaatagacgcgtgaataacaagacgaagttgttagaaaggttgaacagtcctcctgaaatcttggtagatggtatcttaagcagatttaccgtgataaagcctggacagtttggaagatcaaaggatcgctcctatttcattgacccacaaaatgaagataaaatcttatgctacatcttggcaatcataatgcatttggataacttcattgttgaaatcacacccttagcacacgaattgaacttgaaaccttccaaagttgtcagtttgttcagggtacttggtgctattgtcaaaggtgccacagtggctcaagctgaggcttttggcattccaaaaagtactgcagcttcttataaaattgccactatgaaagttccatttaagctacctgaaatgacaagaagaggaagaggtccaagacgttagagttacctagaggtatatactgagcatttggtttgctctggtttttttttttgctagatggttctataaagcagcaaaatataagacggtcctcctgatgagaggaagagaaaaacaaaaataactacatagatatacgctattttttctgagaagatacatatgtacaaatagatattttacaataattttaaa

SEQ ID NO: 2532 - DNA, 473 bp, Saccharomyces cerevisiae
tattaatatagctgaagcaaatcgtatgtccattgagaatctgaaatcatttgatcctttcgccgacacaggagacgacgaaaccgccacttcaaactatattcatattcgtatccaacagagaaatggtagaaaaactttaactacggtgcaaggtgtcccagaggaatatgatttaaagagaattcttaaggtcctaaagaaggactttgcatgtaatggtaacattgtcaaggatccagaaatgggggagattattcagttgcagggtgaccaaagagcaaaggtttgcgaatttatgatctcccaactgggattgcaaaagaagaacattaaaattcatgggttttaagttcaaggcttacgccgagtcgcttactcgctgctcgctttctttcttagtgttgttatcctatataaaacgtaactgtttagttatttaagtccaagtgcatatttacactataatatat

SEQ ID NO: 2533 - DNA, 1772 bp, Saccharomyces cerevisiae
ccccttccccctctccaattggctgtatagacagaaagagtaaatccaatagaatagaaaaccacataaggcaagatgagtgaaggccccgtcaaattcgaaaaaaataccgtcatatctgtctttggtgcgtcaggtgatctggcaaagaagaagacttttcccgccttatttgggcttttcagagaaggttaccttgatccatctaccaagatcttcggttatgcccggtccaaattgtccatggaggaggacctgaagtcccgtgtcctaccccacttgaaaaaacctcacggtgaagccgatgactctaaggtcgaacagttcttcaagatggtcagctacatttcgggaaattacgacacagatgaaggcttcgacgaattaagaacgcagatcgagaaattcgagaaaagtgccaacgtcgatgtcccacaccgtctcttctatctggccttgccgccaagcgtttttttgacggtggccaagcagatcaagagtcgtgtgtacgcagagaatggcatcacccgtgtaatcgtagagaaacctttcggccacgacctggcctctgccagggagctgcaaaaaaacctggggcccctctttaaagaagaagagttgtacagaattgaccattacttgggtaaagagttggtcaagaatcttttagtcttgaggttcggtaaccagtttttgaatgcctcgtggaatagagacaacattcaaagcgttcagatttcgtttaaagagaggttcggcaccgaaggccgtggcggctatttcgactctataggcataatcagagacgtgatgcagaaccatctgttacaaatcatgactctcttgactatggaaagaccggtgtcttttgacccggaatctattcgtgacgaaaaggttaaggttctaaaggccgtggcccccatcgacacggacgacgtcctcttgggccagtacggtaaatctgaggacgggtctaagcccgcctacgtggatgatgacactgtagacaaggactctaaatgtgtcacttttgcagcaatgactttcaacatcgaaaacgagcgttgggagggcgtccccatcatgatgcgtgccggtaaggctttgaatgagtccaaggtggagatcagactgcagtacaaagcggtcgcatcgggtgtcttcaaagacattccaaataacgaactggtcatcagagtgcagcccgatgccgctgtgtacctaaagtttaatgctaagacccctggtctgtcaaatgctacccaagtcacagatctgaatctaacttacgcaagcaggtaccaagacttttggattccagaggcttacgaggtgttgataagagacgccctactgggtgaccattccaactttgtcagagatgacgaattggatatcagttggggcatattcaccccattactgaagcacatagagcgtccggacggtccaacaccggaaatttacccctacggatcaagaggtccaaagggattgaaggaatatatgcaaaaacacaagtatgttatgcccgaaaagcacccttacgcttggcccgtgactaagccagaagatacgaaggataattagaaaaatgcaagcacattcatttatcggctaagtcactgaaattttttttttcgagtgattttatcttgcaagctcactctctttgttcttttctcctctataatggcatcttccccccaccaactcctctctacttgcgtgtgtatttgtttgtatacatgtgtaaatatatatacata

SEQ ID NO: 2534 - DNA, 1743 bp, Saccharomyces cerevisiae
agttttttcttttccacttcctattttctttttttaccagttttccctgctcatcgcatgaagaaaaaaatgataaaagcgttttatggtgatgactaagaaacttgtcttgtcagctggaaagataagagagggagcttccttttcctgagtgacaagataagtgtacaagaaagcatgagtgctctactgtccgagtctgacctaaacgattttatcagtcccgcccttgcgtgcgtcaaacctacccaggtgagcgggggcaagaaggataacgttaacatgaacggagaatacgaggtgagcacggaaccagaccaactggagaaggtctctattaccctatcagactgcctcgcgtgttctggttgtataacgtctagtgaagaaatcttgttgagtagccaaagtcactcggttttcctgaaaaactgggggaagctttcgcagcagcaagacaaattcctcgttgtgagtgtctcgccacaatgcagactatctcttgcgcagtactacggcttaacattggaggcggccgatttgtgtttgatgaattttttccaaaagcatttccagtgcaagtatatggttggaacggagatgggcagaatcatatcgattagcaaaaccgtagagaagatcattgcgcataagaaacaaaaagaaaataccggtgcggaccgcaagcctctattatctgctgtgtgtccgggatttcttatatacacggaaaagaccaaaccgcagttggtgcctatgctgctcaatgtcaagtcgcctcagcaaattacgggctcgttgatcagagctacgttcgagagtctcgctatcgcgcgtgagtccttttaccatctgtcgctgatgccatgttttgacaagaaactagaagcgtcaaggccagaatcgcttgacgatgggattgactgtgtcattacgccacgtgaaatagtgacaatgttacaagagttgaatttagacttcaagtcgtttcttactgaggacacaagtttatatgggcggctatcaccgccgggatgggacccgcgagtccactgggcgtcgaatctgggaggcacttgtggtggctatgcctaccagtacgtaacggctgtccaacgactacacccaggaagtcagatgatagttctggagggtagaaacagcgacattgtcgagtaccgattgctgcacgatgatcgcataatagccgccgccagcgagctttccgggtttagaaacatccaaaatctggtgcgtaaactgacctcgggctccgggtcagagcgcaagaggaacatcaccgctctgcggaagagacgaacaggtccaaaggcgaactcacgcgagatggcggccgccacggccgccacggccgatccctaccactcggactacatcgaggtaaacgcgtgtccgggtgcatgcatgaacggtggtggcctactcaatggcgagcaaaacagtctcaagcggaagcagttggttcagacactgaataagcgtcacggagaggagctagcaatggtagatcctctaaccctgggacccaagctagaagaggcggcagcccgcccgctttcgctagagtacgtcttcgcgcccgtcaagcaggccgtcgaaaaggatctcgtctctgttgggagcacctggtaagtaaggtgtagttttgcacccgtgtacataagcgtgaaatcaccacaaactgtgtgtatcaagtacatagtgacatttaaataatagcaa

SEQ ID NO: 2535 - DNA, 1374 bp, Saccharomyces cerevisiae
tatattgccagatctttatcgcaataggttcatgcactatatgcgcatcccactcttgtacatgcacaatattgtgctcattgtctgaatatatatatatttatatatatatatgtatgtatatatatcagttctagatagactaataccacttcttcgttagaaaaatatttcaatccttattttgtttctaactgttcccttctctccatccaacaaataatacaaaaccactttatataaaaaaaattacaaaagcaaaaaatgttcaagagatttagcaaaaagaaggaggctccagaagacccaaaaaatttgattaatattgataagcctatcaaagaacttcctgcttcgatagctattccaaaagaaaaaccacttacaggtgagcaacaaaaaatgtatgacgaagtgctaaaacatttcagtaaccctgacttgaaggtttatacaagtgaaaaaaataagtcggaggatgatcttaaacccttagaggaagaagaaaaggcatggttgacaagagaatgttttttacgttacctaagggctactaaatgggtgctaaaagactgtatcgatagaatcaccatgactctagcgtggagaagagaattcggtattagtcatttaggtgaagagcatggtgataaaataactgctgacttggtggccgtcgagaacgaatcaggtaagcaggtgattttgggttacgaaaacgatgctagacctatcttatatttgaaaccgggcagacaaaatacaaagacttctcacagacaggtacagcacttggtcttcatgttggaaagagttatcgattttatgccagctggtcaagactctctagctttgctaatagactttaaagattaccctgatgttcctaaagtacctggcaatagtaaaatcccacctattggtgtagggaaagaagtgctgcatattctacaaactcattatccagaaagactaggaaaagcacttttgacgaatattccttggttagcatggactttcttgaagttaattcacccttttattgacccactgacccgtgaaaagctagtttttgatgaaccatttgttaaatatgtccctaagaacgaactagattcgttgtatggtggtgatctgaaattcaagtacaatcatgatgtttattggccagctctggtggaaaccgcgcgtgaaaaaagagatcattattttaagaggtttcaaagcttcggtggtattgtaggtttaagtgaggttgatttaagaggtactcatgaaaaacttctttacccagtaaaatcggaaagcagtaccgtgtaaaggcaaatttagatagataatgataatgcactataatatataataaataaaaga

SEQ ID NO: 2536 - DNA, 2821 bp, Saccharomyces cerevisiae
cttattgagcagcctgccacttgaacatttggcaagaaaggtgagaattgacctcattataattacaaatgagcgggagtttgtctagaggaaatggtggaaagaaagttcttaataagaatcaattactgaagcgaaatcgcataagaaatgctagatcaattagagcagaggccgtggccgcttcatcaacaaaaactgggacaccgagtgatctgagtgaatcgggaagtaagctaaacgtggaccaattcattagttctcgacaattcgaggttaagcagttgcaattggccatgcataattccaaagcagccagctcaacgagaatatttcaggcattgcctcgaaaattgcgtcgtagaacggcttcgcataatgttcgtagaattccaaaaagaatgcgcaatagagctttgagggaaatgcgtaaaagtgatcagcaggatgtgttgaaggggtcttcagcctcttccagaaaagctcatggcctaaatgcaaagcaactttataaagctagaatgtccataaagctgctacgattggctagcaaatctacttctatgaaactcagcatgccaccagaggttacatcatctaactgccacgtaaggcagaaaatcaagacattaaagcgaatgattaaagaatcatcaacagcaaatccaaatataaagttacttaataatcgtatggggagctatgattgcactggtgtcaatgaattagcacctattcccaagggcagggtcaaatatacgaagagacagaagcactttgcttggctacccacccacatttggaatgctaaaaggtcgcacatgatgaaaagatggggatatcaaatggtatgggcacctactcaaaaatgctttaaattgacgcataggttgggcggtgatacctgcagctccgatggggccttatgcatggattcaagttatattggtacaataattgtaaaagacaaaagcaatgacagtgagggggactttttaaaatccattataggaaagttaacagctgaaagagcaaacttaaggaaatatcgcgaaggccaggttttattccaagggttaatttatagtttcaatgaagaaaacggtgaggattctactaagccactgggtccatgcgacgtattttgggtacaaaaggatactgcaattataaggttacacccttcaatttatactcaggtttttaacattcttttgcaacataaggaaaaactaacagtacaagattgtcgatattcattagcaagcgtgacattgaagggagctaaagctctagagtcattagcatcgtgtttaaggagcacagagtactctaaatcgtttgaacaatttaaaatggtttcaatgattaccgatcataatgccctaccacagaggtgtacgtttgcatttgaagccatagatccgcgtcatctagctgctccaaagaaattaaatgattcacagaggaagactgttaattctgacgacattttatcactgcatgaaaactatcctcaagacgaaataaacgccgtttttaacgaattatgtgaccctgaatcacgtactcaatcatacaacaaccaaaacacattaaaagaaatttctgcgagacgttacaaattgctaactgccacaccgaacagcatcaataaaactacagtcccgttcaaagaaagtgacgatccttctattccattagtcataataagaaggctcaagaccagggattggattgttgtgttaccatggttctggctgctaccgttatggcatctactgaaccggataccaaggatgtatcacattggcctcaggcaattccagcaaattcagtacgagaataagcaattatattttccggatgattatccattcactcaattgggttatatagaaaactcattttataaaaaggaggcctccaagacgaagtgggataggaagccaatgggaaaaaggattaatttcgagaagatcaaagacatccataacactaaattaccggcatatagcggagaaatcggcgattttttcagttcagactggagatttttacaaatactgagaaatggaattgattatttacagcggaatgataaaaccttagaactgatggacagtaagaagaccgggcaatttaacgctcagggtgtaagagacatcaactgtgtaaatgatgttttggagttttgcaaagattatgaagccaagaccaaggctatgtcgttgtcgattgaagagaacataccagttgcattgtgtaaaaatcggaaatgtcaatttcgcactcctgatagcattagcgtcaatagttcttcattctcccttacattcttcccacgttgtatcattgctgtatcttgcacactactcgaacgaggtcacccaaaggacaatgcaagaatatatcaagttccagaaaaggacttagagcattggctacaattggcaaaaggggtttaccgcccaaacggaagaaaagatcatgatttgaaaattccacttccagaggtacatgatttgattggttttattaccagcggcacctaccacttaaattgtggaaatggtatgggaatcggatttatagatcatcatgcggccatccggcaaccaactaggtatgtactgatcagaaatgtaggtaccaacacttataggttgggggagtggtcgaaaatatccgtataatgaactgaactgaattatatgtacgaccgatatcctataaagctatgtatacagagggcaaatagcaatcatatcgcgcaataatggtctttttgcttcctggaactctatacgtacacatttag

SEQ ID NO: 2537 - DNA, 2977 bp, Saccharomyces cerevisiae
aatagagaatactttttcgtttttattgtaccattacggctactcaacgagatttcaaaactttagctgtatcgaattggctcttttttcaccctgaagcacaattataagggaacgatgaattgcaaggcggtaaccattagtttattactgttgttatttttaacaagagtatatattcagccgacattctcgttaatttcagattgcgatgaaacttttaattattgggaaccattaaatttattggtacgtggatttggtaaacaaacctgggaatattcacccgagtattctattagatcatgggctttcttattacctttttactgtattctttatccagtaaacaaatttactgacctagaaagtcattggaactttttcatcacaagagcatgcttaggcttttttagttttatcatggaatttaaactacatcgtgaaattgcaggcagcttggcattgcaaatcgcaaatatttggattattttccaattgtttaatccgggctggttccatgcatctgtggaattattgccttctgccgttgccatgttgttgtatgtaggtgccaccagacactctctacgctatctgtccactgggtctacttctaactttacgaaaagtttagcgtacaatttcctggctagtatactaggctggccatttgttttaattttaagcttgccattatgtttacattaccttttcaaccatagaattatttctaccatcagaaccgcattcgactgctgtttgatattttcattgactgcatttgctgtgattgtcactgacagtatattttacgggaagcttgctcctgtatcatggaacatcttattttacaatgtcattaatgcaagtgaggaatctggcccaaatattttcggggttgagccatggtactactatccactaaatttgttactgaatttcccactgcctgtgctagttttagctattttgggaattttccatttgagattatggccattatgggcatcattattcacatggattgccgttttcactcaacaacctcacaaagaggaaagatttctctatccaatttacgggttaataactttgagtgcaagtatcgccttttacaaagtgttgaatctattcaatagaaagccgattcttaaaaaaggtataaagttgtcagttttattaattgttgcaggccaggcaatgtcacggatagtggctttggtgaacaattacacagctcctatagccgtctacgagcaattttcttcactaaatcaaggtggtgtgaaggcaccggtagtgaatgtatgtacgggacgtgaatggtatcacttcccaagttctttcctgctgccagataatcataggctaaaatttgttaaatctggatttgatggtcttcttccaggtgattttccagagagtggttctattttcaaaaagattagaactttacctaagggaatgaataacaagaatatatatgataccggtaaagagtggccgatcactagatgtgattattttattgacatcgtcgccccaataaatttaacaaaagacgttttcaaccctctacatctgatggataactggaataagctggcatgtgctgcattcatcgacggtgaaaattctaagattttgggtagagcattttacgtaccggagccaatcaaccgaatcatgcaaatagttttaccaaaacaatggaatcaagtgtacggtgttcgttacattgattactgtttgtttgaaaaaccaactgagactactaattgatatacaggttctctaaaacaagcagcaaaaaaaaaaaaagcctgcttactacttgttttgagcgttttttcttatcaatagttttaacatttttccacgtaaatatatatatatctatatgtttttatgcattttataaaaaaaatatgtttgttcattactctttcattttttcattgaaaacttttaaaaaatgtcatgattagttacatttcgtatatataaaactataaaactgtgaaaagaaattaaattgaagtttgtcatggatgtccaacgccctatttaatttctttatgcaacatgctttctcttgcggggccggtaccaacccattcaacaggaacgccaacaaaatcttcaatatattttaagtacttctttgcgttttccggcaaatcttcatactttgtaattttggtaatatcttgatcccaacctggcaaaactttgtattcaacttcaactttaccaagaatattcaagtcttcagggaacaaatctagcttcttaccttgaatagaatatgaaatacccactgggatttctttgaaagtatcgaggacgtctaacttggtaatgttcaaactcgtgtatccattgatcaaagttgagtatttcaagactaccaagtctaaccaaccgcaacgacgcttacgaccagtagtgacaccaaattcagcaccaatggtctgcagtttttctccattttcgttcaattgttccgttgggaaaggaccttcaccaactctagttgtgtaggctttaacaacaccataaatttcatcaatagtacgtggaggaatacctaaaccggtgaggacaccaccaataccagtattggaagaagtcacatatggataagtaccaaaatcaatatccaacatcaaagcattagcaccctcaaccaatatctttttctttgcttcaatagcattgtgcatgaaaacgacagaatcgacgacgaatggctttagttgctctcttaacttcttgtattcagcaagcttggcttcaaagtcgtattcgaaatcaccgtatctttgtcttctcgtttccaataatctcttatatctagcaacaaattcctcccaggcaccgggttgatcattcaccaaatgatgaactctcaaaccagatctagaagcctttgtggaataagttggaccaatacctttaccggtagtaccga

SEQ ID NO: 2538 - DNA, 902 bp, Saccharomyces cerevisiae
ccaggatccttgcttatattattgtctgttgctgggccaacacatattttcatttcaacacaccaatctcaggtattaaagagaaatcattgtaaggtaaaaatgtctacgttgaaagttgtttcatcaaagcttgcagctgaaatcgacaaagaattgatgggtcctcaaatcggattcactctacaacagctaatggagttagctgggtttagtgtcgcgcaggctgtatgtcgccagtttccactgagaggcaagacagaaacggaaaagggcaaacatgtatttgttattgctgggccaggtaacaatggcggggatggtctcgtgtgcgcaagacatttgaagctttttggttacaaccctgttgttttctaccccaagagaagcgagcgcactgaattctacaaacagctggttcaccaattgaattttttcaaagttcctgtcctgtctcaagatgagggaaactggctggaatatttgaagccggaaaagaccttatgcattgtagatgcaatatttggttttagtttcaagcctcccatgagagagccattcaagggcattgtcgaagaactgtgcaaagtgcaaaacattatcccgattgtttcggtggacgtccccacaggttgggacgttgacaaaggtccgatctctcagccctcaattaatcctgctgttcttgtatctctgactgtccccaagccatgcagctctcacataagggagaatcaaacaactcattacgtggggggaagattcattcctcgagatttcgccaataaattcggctttgagccatttggatatgaatccacagaccaaatattgaaactctgatagcccaaatctataatgccactaccatacataatttttatataatcccttattttgtg

SEQ ID NO: 2539 - DNA, 3002 bp, Saccharomyces cerevisiae
ctttaaacaagcacagacctccaaaaagaaaaggcttttgaaacgctgctcacgcacagttgtttattccgtccacatattttacgtgtcagtttcctttctgtcttctctttattcaatcaattagcattaaagagaaaataagtcgtgtactttgaaaaccttctgttcctgttttcttcccgtatttttcatttgcttcaccagctttttctcaactgatcatatcatttcaagttaaaagtctttgtcatcacttttctgtgagttgcaaatatttgtaagcgtcacttacctagagcagcctttatcgatcaatatttcagagggaaaaacctgtatctcttagcatgcaaagttcagtttattttgaccaaacagggtcatttgcgtccagtagcgacaacgttgtgtctagtaccaccaacacacacaacatttctcccagtcatcgttccagtttgaatctgaacactacttctcatccccacgaagcgtcgggtagaggaagcgcaagtggggagttgtatttgaatgacacaaactcacccttagcgatatcttctatgctaaacacacttgcccttggaagtatgccccaagacattgcaagcagcaacattagcaatcacgataacaacattaaggggagctacagcctaaaattgtcaaatgtagccaaggatattactctcagagaatgctatgcaatcttcgctcttgctgaaggtgtgaaaagtatagaattacagaaaaaaaactcttcatcaagcatcacttctgcctcattagaagacgagaatgatatttttatcattgccagatttgagttattgaatctagctattaattatgccgttattttgaattcgaaaaatgaactctttggacccagttttcccaataaaacaaccgttgaaataatagatgacacaacaaaaaacttggtttcattcccatcatctgccattttcaatgacacctcaagattgaataaatcgaactcgggaatgaaaaggccaagtctgttatcacaaagatccaggttttcattcagcgatccattttccaatgattctcctttaagccaacagcaatctcaacagcagcagcaacagccacaacagccacaacaacactctacgcaaaaacattcaccacaacaatgtaatcaacaacaagtgaattcttcaataccgttatcttctcaaggccaggttattgggttacattctaaccattcacatcaagatttgtctgtggaatcaacaattcaaacatctgatattggcaaatctttccttttgagagataacactgaaattaatgaaaagatatggggcacaagcggtataccttccagcatcaacggttacatgagcactccccaaccttctacgccaactttagaatggggaaatacttctgcatcccaacatggttcttcgttctttttaccctctgcagcatcgacagccattgcacctacgaatagcaacaccagtgccaatgcaaacgccagctccaacaatggagccagcaataatggtgctaaccaggcactctctgccagctcgcaacaaccaatgatgcaaattggtaacacgattaacacttccctaacctcttcaaattcattgcctccatacggtttaatgtcttctcaatcgcagcacatttcaaatatggtaaacacctctgatatgaacattacacctcaaaaacagaacagatttatgcaacaaccccaaccagagcatatgtatcctgtgaatcaaagtaacactcctcaaaaagtaccgcccgcaagattaagttcaagtagaaattcacacaagaataactctactacctcattatcctcaaatattactggatctgcctcgatttctcaggctgatttgtcactactagccagaattccacctcctgccaaccctgctgatcaaaatccaccttgtaataccctttatgtagggaatttaccctccgacgctactgagcaagaactaagacagctattttctggtcaagaaggcttcagaagactatcattcaggaataagaataccacatctaatggtcatagtcacggaccgatgtgcttcgttgaattcgatgatgtcagttttgcaaccagagcgttagctgaattgtatggtagacagttacctcgctccactgtgagcagtaagggaggtatcagattaagcttttcaaaaaacccactgggtgttaggggcccaaacagcagaagaggaggcagtggtaacccaaatcctaatgtaaatatgctttccagttacaattctaatgttggtcatataaaaaactaaaaaaatggttccgcaaaaacctgatttccttgcatgtatcacattatatgcattgcttttcatctttcccccactataataagaataatattttctgtcgcattttttctttttcttttattatttgttataataatattttctaaaccgactaataataagaataacatcgataatactttatctcttcaattacgttaaattatctttttactattacattacaacgtgcatataacagaaattttttctttttctgtctaacatttgaattgtactatgaattaaacccgccatcttttttcttaactaccattttgcgaactcctataccgcttctgcaacaacaagaacttttattttcaattttaatgtgccattcattccattttgcttgcgctaatgtgaataagattgagagggaaaagtctcactatcgaatatcgctctttagtgtgattattgtcatcaaagcaccaagtgcttaggtgaggtcatatccgacaaatgttttgaagagagaatatcttttttttatgctgccaacttttattctttccttgtttaaaaaactctgcctttggatattctcccactatatatatgtattagccttacttttattccagaactcatttttatagaagtatatatcggtatcgactt

SEQ ID NO: 2540 - DNA, 681 bp, Saccharomyces cerevisiae
gcgtgaacattcaaatcgacagcgtaaccttctgtatttatttctgtttgttgtactttcgaactctcgaataccatagaggaactattagtctccataatgtcacaggcagcaaaaaacgtgatagtaaagctaatagtaggagcaggccaagcggcaccatcacctcccgtggggcccgcattgggctccaagggtataaaagccattgacttttgtaaggaatttaatgcaagatcagcaaactatcagccaggtgtaccggttccagtattaatcacaataaaacctgatagaacatttacgtttgaaatgaaatctccaccaaccggatatttgctgctaaaagctcttaaaatggacaagggacatggacaaccgaatgtggggacaatgttaggcagtgcacctgccaagggaccaacccgtgctttaggagagttatcgctgaagcacgtttacgaaatagccaagataaaaaagagtgatgaaaggcatagtttattggagatggaaggtattgttaaatcaatagttggcgttgcaaaaagtatgggtattaaggttgtaccttgatctgtaagtagtgaaaagacaaaaaagtaccgtcaatttcgagaaattttcaacagaccttccttcttctttctactgatctattctgtaaatatgtatataagt

SEQ ID NO: 2541 - DNA, 1794 bp, Saccharomyces cerevisiae
tatgcgttaagattgattgttcaatattcataaaacaggatctttcaagggacgataaaatggatgagcaagttatttttacaacaaatacctcaggaacaatagcttctgtacactcatttgaacagataaatttgaggcaatgctccactcaatcaagaaatagctgtgttcaagtaggaaataaatacctttttattgctcaagcacaaaaagcattaatcaatgtctacaatctgtcaggttctttcaaaagagaatctgttgaacagcgcttaccattacctgaaatcctaaaatgtctggaagtagttgaaaatgatggtgtgcagtatgatagaattcaaggtgtcaatcataatttaccagacttcaatcttccgtaccttttacttggctccaccgaatcgggtaaattgtacatatgggagttaaattcagggattttattgaacgtgaagcctatggctcattaccaaagtatcaccaagattaagtccattttaaacggcaagtatattattacttctggtaacgattcgagagttattatatggcaaactgttgacttggtatcagcgtccaatgatgatcctaagcctttatgtatccttcacgatcatactctacccgtgacagatttccaagtttcttctagtcaaggaaaatttttatcatgtactgatacgaaactcttcacagtatctcaagatgctaccattagatgctatgatttgagtttaataggcagcaaaaagaagcagaaggcaaacgaaaatgacgttagtattggtaagaccccagtattgcttgcgacatttacaactccttattctatcaaatccattgtactggatcctgctgacagagcatgctatattggtactgcggaaggttgtttttcattgaatttattttataaactaaagggtaatgctatcgttaatctgctacagtccgccggagtaaacacagttcaaaaaggtagggttttttccctagtgcaacgtaactcactaactggcggcgaaaatgaagatttggatgcactatatgcaatgggccaacttgtctgtgagaatgtcctaaattcaaatgtgtcatgcctagaaatatcaatggatggtacattattattgatcggtgatacggaggggaaagtttctattgcggaaatttactcaaaacaaatcattagaactatccaaactttaactacatcacaggattcagttggagaagtgaccaatctcttaaccaacccttacagactcgaacgtggaaatttactttttgaaggagaatccaaaggcaaacaacctagtaataataatggtcacaattttatgaagataccaaacttacaaagagttatctttgatggtaaaaacaaaggccatttacacgatatttggtatcagataggagaaccagaagcagagacagatcctaacctcgcattaccacttaacgactttaatgcctatttggagcaggtcaaaacgcaagaatcgatattttcacatatcggtaaggtgtcaagcaatgtaaaagtgattgacaataaaatcgacgccacttcatctttagacagcaatgccgctaaagatgaggaaattacagaacttaagaccaacatagaagcattaactcatgcctacaaggagttacgtgacatgcacgaaaagctgtacgaggaacaccaacagatgcttgacaagcaataaacggaatagtcgcgcattttgtacaataaaataggaatgttattaaaatatacagcatagatagata

SEQ ID NO: 2542 - DNA, 1122 bp, Saccharomyces cerevisiae
tcacctcaccctatcttttttattaaagaaaatgaacttccacacggcaagaatatctcaggtcggtgtcatttctagggctctactttcttctgtaagtagacgttggattcatgtaacgccaataagtcttaataattcaggaggatcactattcggaagcattacagaaaataaaccaaaggaaggaaaaaacaggggggatgaagatgcaggcagcttctctaataggttagcgattgcttctgattcttctggagaggctcctgaagttaatagggattcaataaccatagaaaacgataaactactacagcaacatatcatatcgttgcagcaaccggaacaattagcatcacagagcttattatctcctttgaaaagggaaatatatgaagctaattgtaaaattaatggtgggttttacaagaaagatactattgtaaagttaccaaattctagcgaacgttacaagctaaagttcacaaaaagagaaattgaagtactagaaccttccgtatatgctcagtcatatagaattaaatcgtcgatgaaaaaggctacacttttgttgaggttattgggaggcctcgacgttatgaaagctatatctcagtgtcacttttctaataagaaaattgctcgcgaagtagcagaactacttcaaaaaggtgtaaaagatggccaaaaattaggtttgaaaccagaggacttatatatctctcagatttggacagggagtgacgggttttggagaaaacgtgttgaattcaaggcaaggacaagaatcggaatcataagtcatccttacatacatgtcagatgtattctgagaacaaagagtgttacgaaacgaagacttgcttatgaagcacatttaaaagagcaaaaaagagcgccatgggtacagttgggagataagcccattaggggtgttacaggcggcgtatacaagtggtgaaaacgatagcgaactcattcatatccgagaaatcgtcctgtaagctgagaaagatgaactgctactcacttcttaacctatattcacagttgtgttgtacaaaacttttcttttgattatataatattgtgattctgtaaataacaactagtttcaacgca

SEQ ID NO: 2543 - DNA, 1302 bp, Saccharomyces cerevisiae
atgtcagaaacagaactgtcgaaagaagatgctgttacaaaaaaggataacgaggaacaagtcaagaaggctttactcgatccaacaaaaaagagaaaagctgaagatgaaattgagattgacctgaaaagctccattcccctatcaaaaaaacagaaacgtctcttgagaagaggtaaagttactctagaggagttgaatgcgaagtacaatatcgaccctaagtcaatcgaggaatacaaagaagatgctgaaaagaaaaagtctggtgcttctgagaaagacgcccagggtgaagaatctacaatcaacactccaacaggagatgaatctggcgaggttgtaaaaaagaagaagaaagatgaaaataaatatggtgtttggattggtaacttatccttcgacaccacaaaggacgatttagtaagattttttattgctaaaacaaaagacaacgaagatgaaaagagcagagtcaccgaacaagacataaccaggttatccatgcctcgtgttgctgccaagaactctaacgccatgaaaaataagggattttgctacatgtttttcaagaacgtcgagcagatgaaagcggtcttagaattatctgaatctcatttaaacggaaggaatatgctaatcaaggactccgaaaattattcaggtaggccagacaaggacgatttagttgccatgtccaaaaatccaccgtcaaggattctatttgtcggtaatttgtcattcgatgtcacagatgatctgttaagaaaacacttccaacattgtggtgatatcgtgaaaatccgcatggcaacattcgaagatagtggtaaatgtaaaggattcgcatttatcgacttcaagaatgaagaaggatctactaatgaattaaaggataaaagttgtagaaaaattgccggaaggccattgcgaatggaatacggtgaagatagaagtaaaagacaagttcgtaagaaggttgaaaatgtatccagaaacaattcctcatcatttgatatctctaacaacaaaggatacgatcgtgcgggacaggataacggcagcaaacccgaatacaagcggtccaacgccaacagacgtccacctgtagattccaataaccgaactaagagcagtgtagctttagccactgctcagagaggttctgcagctattgtcccatcacaaggtaagaaagtgaagtttgactaatcagcgtgaactgactgtaggtgccacgtatataatgcgattatttcgcttgtaaattattcaatcattcatgttttatatatacattgt

SEQ ID NO: 2544 - DNA, 1217 bp, Saccharomyces cerevisiae
taagcattataagataatattaaagggaaagtgtttctagaatgcaatcgagcttacctcaatttacgttcaaatggcccaaaggacccgaagcaattattctgacaggcacgttcgacgactggaaaggtactttgccgatggtgaaggaccccagtggcgccttcgaaataacgctgccagtaacgtttgatagccctagcagcaagttttatttcaagtttattgttgatggccaatggctgccaagcaaagactacaaggtgaacatcgacgagggagtggaaaacaactttattaccgaggaagacgtaataaagcaacgcgaaaatggctctagcacgctggtacctgaaagtgccggattagctgtttcaaagaatgcccctcttatcgaaccagaagctgaaaaacgtgcaaaaaaattaagaaagttcaagatcaagagagtgatcaagacaaataaacaaaccggagaaaggtcgatattttcccaagaagtggttgaattgcccgatagcgaggatgaaacccagcaggtgaacaaaacgggcaagaatgcggatggcttaagcggtactacaacgataattgagaataatgttggtgtaaacgaggaaaaagcaatcaagccgtatgaagagaatcaccccaaagttaatctagttaagagtgaaggatatgttacggacggtttgggtaagacgcaatcttctgagtctagattatatgaactatcggccgaagatcttgaaaaggaagaagaggaagaggacgaagataaaggcggcggtaaggacaccagtacaagtgcagacgctgaagcttcagaagatcaaaataaggaaccattaagtaaatccgctaaatttgaaaaaccggaagaaaaagtacctgtaagctcaattacaagccatgctaaagagacttctgtgaaaccaaccggcaaggttgcgactgagactcaaacttacgagacgaaacagggcgctcctaccgctgccgcaaaaaaaatcgaagctaagaaagctactagaccttcgaaacctaagggcacgaaagaaacaccaaataaaggtgtccaaaagaaccctgctaagaatggagggttctttaaaaagttggcccagcttttgaagtgaaaacaatcaggagaatacctaaatatatgacgtactcgccatacctaactatgtaaaacctaattatgtattaat

SEQ ID NO: 2545 - DNA, 1629 bp, Saccharomyces cerevisiae
cgctttaaggactcttcagccagttgttagcagatcgctcaaatccttcttggtcgttattttttgaagaagaaggaaaagcaaagccagcatgtcaattatgccagttaagaacgccttggcgcaagggaggacgctcctcatggggaggatgcctgctgtaaagttttctacaagaatgcaattaagaaatagaactgcggtgctatggaatagaaagttttccacgcgtcttttcgttcagcaacgacgcagttctggagagattgtggatcgtgccaaagctgctgccgcaaatagcggaagaaaacaggtctccatgaaatgggttgttttaactagtttcaccattgttctaggaaccattttactagtgtcaaggaatgatagtacagaggaggatgctacagagggcaaaaaagggagaaggacaagaaaaatcaaaatatttaacaataattggctctttttctgctattctactttaccgctgaatgcgatgtctcgattatggggccaagtaaattctcttacgttacccatttgggttagaccatggggttacaggttatattctttcctttttggagttaacttggacgagatggaagatcctgatttgacacattatgcaaatttatccgaatttttctatcgtaacataaaaccaggcacacgtccagtagcacaaggcgaagacgttatagcttctccaagtgatggaaagattttacaagttggtataatcaactctgaaactggcgaaatcgaacaagtcaagggaatgacatattccatcaaagaattccttggcactcactcccaccccttgatgtctaagagtgcatctagtctagatttgacttctgatgaggaaaagcatagagaattcgccagggtaaatagaatacaattagcgggttccgaagacactgaacagcctcttcttaactttaaaaacgagggcgatcaatctgttcgagagttcaaaccaagtgtgtccaaaaatatacatcttttaagtcaactttctttaaactacttctctaatgggttttcgtgctctgagcctcatgatacggaacttttctttgccgtcatttatttggctcccggtgattaccatcatttccactctccagttgactgggtttgtaaggttcgccgccatttcccaggtgatttattctccgtggcaccttatttccagcgtaacttccctaatcttttcgttctaaatgaaagagttgctttgttgggtagttggaagtacggattttttagcatgactcctgttggtgcaacaaatgttggttcaatcaagttgaattttgatcaagaatttgtgacaaattcaaagagcgacaaacacttggaaccacatacctgctaccaggcagtatatgagaatgcaagtaaaatattgggagggatgcctttggttaagggtgaagaaatgggtggctttgaattgggtagcactgttgtactttgttttgaagctcccactgaatttaagttcgatgttagggttggtgataaggttaagatgggacagaaattaggcataattggaaagaatgatttaaaatgaaagcaatcatatgtaaagttagcatttattttgct

SEQ ID NO: 2546 - DNA, 958 bp, Saccharomyces cerevisiae
aagctatcgagtaaagactcaggaaattgccaaaacgttatgagctacaattatttgaaggcagctagaaaaattatatgcattgggcgtaattacgcagcgcatatcaaagagctgaacaattcaactccaaaacaaccgttttttttcctaaaaccaacctcgagtattgtgacaccattgtcttcatcattggtcaagaccactagacctgcaaactcgactttcaatggtttaaatgaagacggaactaaccccgggcccatttttatcccacgcggtgtgaaggttcatcacgaaattgagttggcattgattgtgagcaaacatttgtccaatgtcactaagatgaaacccgaagaagtctatgactctattagtggtgtagctctagcattggatcttacagcaagaaatgtccaagatgaagccaaaaagaaggggctaccttggactataagcaagggttttgacaccttcatgccaatctctgctatagtctcccgcgagaagttctcatcctacaaatcaaacttacaggatattttcagagtcaagtgctctgttaacggacagttgagacaagatggtggtactaacctcatgttgcacccactccataaaatactgcaacacatatctaccatgatatctctggaaccgggtgatatcattttgactggtacacctgcaggtgtaggcgagttaaagcctggtgaccgtgttcactgtgagctattgcagaataatgacaatattgtcgacatgaacttcgaatgtgaaaatcggccgggaccatatgaatttagagaaacataatgtctgtcgcattcacgcttgtcgcagataacacgttatgcgttactaatttcctacaagcttggcacatatacgaccaattgtgcttctgtatacgctacgctatgtaatcacatatcacatgcagggtaaccagcac

SEQ ID NO: 2547 - DNA, 1202 bp, Saccharomyces cerevisiae
cacaagcatttagtgagaaaaaatggcgaggcctcaaaatcatcgccgcagtaattggacagaaagagacgataatgatgattatctgtttcagcgatttctagaagaatcggaaacgaggcatagtagagagccttcacctgtaaccgagcaatctcagcaagaactacagcaggatgtacagcaagcaatcgatggaatatttaactcccttaggaggaatatgagttctacttcaaatataaatagagcagctaatatggatgcaaccacaaacggaaatggaggaatcaatgcagacactataagagccaccaacgccaatacggccgattccccattcacagcaaggcagcagagccctctcagaacttttcttagaaatttattcattttagattactttattgggctaattttattcccattttccgtatacaacatattaaggagcgggttcaattcaatgaccttttcagagaatgattttataatcgaaatcgtgggatactggaaatttgccaagatatttggttctggtggcacgacattaatagcatataaggatactggtaaattagggttgcttggaaagtttcataacatcattgtattttactcttcacctgtgataaaacatattatgaaaagtagagatggcaatgaacccaacttaaattggataagactaatgttcgctaaagctttcgagctatttgtcaaagtctctaccattctgatctatttagcttatggcgtaagtggtaccgtttacatggttaccgctgggtttttcttcgtattgtgtctattattcactgttattagaagatataaaggtgtccatcgaatgttggtgagccaaaggattacagggccaggcgtattctgatgatgaatccacgattataatttgtgtatttgcttatctgtagtagtttctttcgcatgtggtcgctgtatgagacacttgacaccagaggacgtttattttgaagcaactcctctatgtaagagctgtttgcaagctttccgtactgtgacacttgaccatcataacgtatattaacgaactactagggttgttgtgggcttctttcaaaatgggaattgttaaaaactattgataaacgccactcactacatgcattgattgtaagatttaactatcctttttacctgatgtctcgaaaataagcgtt

SEQ ID NO: 2548 - DNA, 1174 bp, Saccharomyces cerevisiae
cattgatgatagggcttattgtagtacctattttatttgcaataaagggcatagtagttggcgtgcaaaaggtaaagaaaaagtttggaaagcactcaaacacaaaggaccaaaaagaagacaaggacgaagataaacgacaaagtatttctcaaagaaaacagcatacagaatggccaatagaggagaaccggatccaaagaagagcaccgaatcaatctgctctctgactaaaccgcagctttattcattatatgatgatgacgtcgtgagatcggaagataacgaaatttacgaagaattgaaacgctctgtctctatagattctaccaaatatagtagagatcaaactattgattcgactttttacttggcccataaggttggcggctcgctgccaaggaacacagtatcttctaataatttggaaaggattttatcagcatcatccattcacgaaaactttccgtcaagaaccagacaaactcgtcaaaatattcttcattacctgcaagctgtattaattttgtcattgagcggtttcgcatatcatgaactgtccagaaacttgcacgataatcatctcttacatccagattttgcatcgagaccccttctactgggtgtcaaactttgtaactggctatccaatggggttctgccaaactggttaggctacggtgttgaaggactgttatttggttctgttgtaccaattctggataatatttttcaaacagaggttgttaagagctctgtccaccatgacagtttgacctctgttattagaagtatcaatgccatgttgggagtcacatttgggatcaggaaaatacagtggaactcctctttgcaggcggcaggggcatgggggcttctgaatattatactgtggttgttttttgacggctcaatatccatgttaatgagctgcatctgcattggggtgggttgttgtatctcttgctacaaagatattatcgacggttcccaatttttatatttcatggatttttatttccttggttctctaatgtttggaaaactaggaagatatctatattctcattaaagtcgaaattctgacgagtaaatattattaattagaagtacaagaagataacatcagaatggcttatcgtttatatataactaattaacgtaaacacagtca

SEQ ID NO: 2549 - DNA, 2163 bp, Saccharomyces cerevisiae
gaaattaaagaaaagtaaagaacatgataataaaaagcaagtttaagttattgtgtatgagatagagttttttttgtatacctttgtaatccgcatatattcctaagtaccttttttttcagacagaaaaaaagagtttctttacggaaattacttctttcgtttgatattgtttttctctttcgagatttaagaacgtggttgtgtttcgtgtttctgtgcagatcatattagaaagtttttttctccattttgatagacaaaacttgttgtttctactgaacacagcatataagccaagaaaatagttttccaaaaatgtctcaagtgcaaagtcctttgacagcaacgaactctggtttagctgtcaataataacacaatgaactcacaaatgcctaaccgtagcaatgttagattggtcaatggtactttacccccatccttacatgttagctctaacctaaatcacaacactggcaatagctctgcctcctattctggctcacaatcacgcgacgattccactatagtcgggctgcactataagataggtaagaaaatcggtgaaggttcatttggtgtactttttgaaggtacaaacatgatcaatggattaccagttgctatcaagtttgaaccaagaaaaacagaagccccacagctaaaggacgaatatcggacctataaaattttagcgggaacacctggtataccacaagaatactactttggtcaggaaggattacataacatattggttattgatctgcttggtccttctttagaagatttattcgattggtgtggaagaagattttcggtaaaaactgttgtacaagtcgcagtacaaatgataactttaattgaagatttgcacgctcatgatttgatataccgtgatattaaacctgataattttttgatcggaagaccgggtcaaccagatgctaacaaagttcatctaattgactttggtatggccaaacaatatcgtgatccaaaaactaaacaacatattccgtacagggaaaagaaatcattaagtggcacagcaagatacatgtcgataaatacacatttgggtagagaacaatcgagaagagacgatatggaagctatgggtcatgtcttcttttatttcttgagggggcagctaccatggcaaggtttgaaagcaccaaataacaagcaaaagtacgaaaaaattggcgaaaagaaaagactaacaaatgtttacgatttagctcagggtctcccaatccaatttggtaggtatttggaaatagtcagaaatttatcgtttgaggaaactcctgattatgagggctaccgcatgttacttttatctgtgttggatgatttaggtgaaacagcagatggacaatatgattggatgaagctgaatggtggccgtggttgggatttgtcgataaacaaaaagccgaacttacatggttatggtcacccaaatccaccaaatgaaaaatcaaaaaggcatagaagtaaaaaccatcaatattcatcacccgatcatcaccatcattacaatcaacagcaacaacaacagcaggctcaggctcaagcacaggctcaagcacaagccaaagtgcagcaacaacaattgcaacaagcccaggcccagcaacaggccaatcgttatcaattacaaccagatgactcgcactatgacgaagaaagagaggcgtcgaagcttgatccaacttcgtatgaagcatatcagcaacaaactcaacaaaaatatgctcagcaacaacaaaagcaaatgcaacagaaatccaaacagtttgccaatacaggtgccaatggtcaaactaacaagtatccatataatgcgcaaccaacggcgaacgacgaacaaaacgctaaaaacgcagcgcaagatagaaatagtaacaaatcatcgaaaggttttttcagtaagctaggatgctgttagaatagaaaacggaggaggttttttgtaatcattcccaccaccgtccagtgatcttcacattttgttctagtattatgattttgatgtacatttgatatttttttatgttttttatttaaaaagtaagggcgaaaatgtctattattaaaaaaatattaagtactttacgtgctttttaatatcgttttttattgattatgtatc

SEQ ID NO: 2550 - DNA, 602 bp, Saccharomyces cerevisiae
ccaagaaactaacagaggaccattatggaactgttaccacagggacaaaggaacaacactcaggtaacgttcgaagatcagcaaaagatcaacgagttttcgaagttgattatgcgtaaggacgccattgcgcaggaattgagtttacagagggaggagaaggagtacctcgatgatgtgtctctagaaattgaattgattgacgaagatgagcccgtgcaatacaaggtgggcgacctctttatcttcatgaaacagagcaaagttaccgcacagctcgaaaaagacgcagaacgtctcgacaacaaaatagagactttagaggacaagcaaagagacattgattcccgtcttgatgctctgaaggcgatcctgtatgctaaatttggtgataatatcaaccttgaacgttagaacactcattaaagtgtgggctgtgggtgtctccacaaaatgagtaatgaaaaatttttaattttttcaggagggaaattaaagaaaagtaaagaacatgataataaaaagcaagtttaagttattgtgtatgagatagagttttttttgtatacctttgtaatccgcatatattcctaagtaccttt

SEQ ID NO: 2551 - DNA, 895 bp, Saccharomyces cerevisiae
gaaagatattgtaacttgatagtaccgagcatatataccccgaacaaacatgagttcttataggggcggcagtagaggtggcgggagcaactatatgagcaatctacccttcggattaggttatggagatgtaggcaaaaatcatattacggaatttccatccatcccattgcccatcaatggtcctataacaaataaggaaagatctttagcagtaaagtacatcaattttggaaagactgttaaagatggcccattttataccggatcaatgagcttgataatagatcaacaggaaaacagcaagagcggtaaacgcaaacccaacataatcctagacgaagacgatactaatgatggcattgaaagatattccgataaatatttgaaaaaaaggaaaataggtatttctattgatgatcatccgtataatttgaacctctttcccaatgaattgtacaatgtaatggggatcaacaagaaaaaattattggcaatctccaagtttaataatgccgatgatgtttttactggtacaggtttacaagatgaaaacatcggactatccatgctggcaaagttaaaggagttggcagaagatgtggatgatgcgtcgacgggtgatggggcagcaaaaggaagtaaaacaggcgaaggagaagatgatgatttggcggatgatgatttcgaagaagatgaagacgaagaagatgatgatgattataatgctgaaaagtatttcaacaatggtgacgatgatgattacggtgatgaagaggatccaaatgaagaggccgccttttagttgaaaatttataccgctttaccatatttttggatattcttcaaagcagaatttgtacaattagcatttttctttatggtttagatcggc

SEQ ID NO: 2552 - DNA, 532 bp, Saccharomyces cerevisiae
gatgttatgaagagaaaaactgccgagtaattgaaagagatgtctgaagtagcggaaacatgggtggatacctggatggcaaaactagtcaactatgactacaagcactttataagattggtgataattgtaggtggttatttactcttaagaaatatcgcatccagggaattggcgaagaagcagttggctgcccaagtggaaaaggacaaacgagacaaagaggaaaagagatcaaaagacctgatcgacaagccagatgatgctgcaacagcagaaacaacttctttcggttggggtaagaaaactagaagaagagttaaaagacaacaggagttgtttgaaaacgctttggaagaggctaagagaagaaaccaagggttggacccagatagtgatgctgatattgaggaactactggaagaataggctctctgtgtatgtatgggttcctctttgtcattgtgacattgttttgtttttagtttttctatagttttctgataaaatagtctaaccattaccgatgttg

SEQ ID NO: 2553 - DNA, 1757 bp, Saccharomyces cerevisiae
cagaggaagtgcaactaattcgaatatatatcgagtaggagctcctttatacttttttggtacggaagactggttacaattaaaatacagagataatgccaagaaaggctaatttgctaaaatctttggcaagaggacgagtacgcacttctttcaataagtataatttgtttaatttgtacaaaaagggtggtgtagacttgaagtctaaatctttgtatcaacagaagtggacggcaaagcaggaaacccgagcttatcatggtgaacatttgacagaaaagagatggcaaaccgttttcaaacccaaattggattcagtagcacaattggatgcttcactgcgtggaggtgaaatcaaggaaacaccatttttattacaaacttttgcagtattagaaaaaaggcttgattttgcccttttcagggctatgtttgcttcgtcagtaagacaagctcgtcagttcatcttgcatggaaatgttcgcgttaatggtgtaaaaattaagcatccaagctatactttaaagcctggagatatgttcagtgtcaaaccggacaaagtgctggaagctctcggtgccaagaaaccaagtttccaagaagcgctaaagatcgataagactcaaatagttttatggaacaagtatgttaaggaagcgaaaacggagccaaaggaagtttgggagaagaagttggaaaattttgaaaagatgtcggattctaacccaaagaaacttcagtttcaagaatttttgaggcaatataataagaatctggagtcacagcaatataacgcattaaagggatgcacacaggaaggtatcttgagaaagcttttaaatgtagagaaggaaataggtaagtcgaataatgagcccttgtcgatagatgaactcaaacagggtctccctgagatccaggactctcagttgttagaaagtctaaataacgcttatcaagagtttttcaaatccggtgaaattagaagagaaatcatttctaaatgtcagcctgacgagttgatttcactggctacagaaatgatgaatcctaacgaaaccacaaaaaaagaattatctgatggagccaaatccgctttaagatctggaaaaagaatcatagcggaaagcgtgaaactatggacgaaaaatataacagaccacttcaaaactaggatgagtgatatttctgatggttcactaacgttcgaccccaaatgggccaaaaatttaaaatatcatgatccgattaaattatctgaattggaaggtgatgaaccaaaagcacgtaaattgataaacttgccgtggcagaaaaattatgtttatggtaggcaagatcctaaaaaaccctttttcacaccatggaagccaagaccatttttatcgcctttcgccattttacctcatcatttggaaatatctttcaagacatgccacgctgtatacctaagggatcccgtcgctcgaccaggccaatccgaagtaatttcaccatttgatgttcctgttcatgaacgtgcatatatgtattacttgagaaatggtaaatgatcgtcgtgtattgttgcacgcgtcttttgactgatcttcagcctctctttacactgtaaatatttaattttttttgtttttaagttctactcgaacgatcaagtagtcacttagtcgctcctcgttttcctgttacttctttaagaaaaggttacacatgaaaaaaaggttttacaaaaagtatataattgtttattcatt

SEQ ID NO: 2554 - DNA, 562 bp, Saccharomyces cerevisiae
tcaatcaaaacaagtaataatgtctgaagtaattgaaggtaacgtcaaaattgacagaatttccccaggtgatggtgccaccttcccaaagacaggtgacttggttaccattcattacaccggtaccttggagaacggccaaaaattcgattcctccgttgacaggggctctccattccaatgtaacatcggtgtcggccaagtcatcaagggttgggatgttggtattccaaagttgtctgttggtgaaaaagctaggttaaccatccctggcccatatgcttatggcccacgtggtttcccaggtttgattccaccaaacagtactttggttttcgacgtcgaattgttgaaggtcaactaaaagcaaagtactatcaattgagccgcctttctgctttttatttatgtttatggtaagtatctgagccttaattgaaatagatatataattacaaaagattagacaaggagaagcatacgtatattctatttcttcattaaggttattttattctatatctgctacactacattaaatacagatacctctatggaacgg

SEQ ID NO: 2555 - DNA, 1226 bp, Saccharomyces cerevisiae
taattctagttgaaaaaaaatcgttaactatacacagcaaaaagcaatatcatactgcatatcaagcatgtccgcctcgattccagaaaccatgaaagccgttgtcattgaaaatggcaaggctgtagtcaaacaggacattccaattcctgaattagaagaaggatttgttctaattaagactgtcgccgttgccggtaaccctaccgattggaaacatattgatttcaagattggtcctcaaggtgccctcttaggctgtgatgcagccggccaaatcgtaaagttgggcccaaatgttgatgctgcacgctttgccattggtgattacatttatggggttattcacggtgcttcagtgaggttcccctcaaacggtgcctttgctgagtactctgccatttcatccgagactgcttataaaccagccagagagtttagattgtgcggtaaagacaagctaccagaaggccccgtaaaatctttagaaggggcagtatccctcccagtctcattgaccacggctggtatgatccttacacatagttttggcttggacatgacatggaagccctccaaagcgcaaagagatcaacccatcttattttggggtggtgccactgctgttggccagatgcttattcaattggcaaaaaaactaaacggtttcagcaagatcatcgtcgttgcttctcgtaaacatgaaaaattgttgaaagagtacggtgcagatgaactttttgactaccacgatgctgacgttatcgaacagataaaaaagaagtacaacaacattccttacttggtggactgtgtctccaacacagaaactattcaacaggtgtacaaatgtgccgctgatgacttagacgctacggtcgttcaattgaccgttttaaccgaaaaagatatcaaggaggaagacaggaggcaaaacgtcagtattgaaggaacccttctatatttgataggaggtaacgacgtcccatttggcacgtttactttgccagcagaccctgaatacaaggaagccgccataaaatttattaagttcatcaatccaaaaatcaatgatggtgaaatccaccacatcccagtgaaagtttacaagaacgggttagatgatatcccacagttacttgatgatattaagcacgggaggaattctggcgaaaagttggttgccgtcttgaaataaataatctatagctacttatgtatatagc

SEQ ID NO: 2556 - DNA, 1290 bp, Saccharomyces cerevisiae
tcgaaaacagtattactaactgattcaggggaaacaatgggattctttattcctcagagtagtttgggaaacttgaagctttacaagtatcaaagtgatgaccgctctttcctttcaaaccatgtattgaggcccttttggagaaagtttgcgactatttttccactatggatggcacccaatttggtaacattattagggttctgctttattatatttaatgtgttaacaacactttactacgacccgtattttgaccaggaatcgccacgttggacctatttctcctatgctataggtttgtttttataccagacttttgatgcttgcgatggaatgcatgcacgtcgtacaggccagcagggccctctaggggaattgtttgaccattgtattgattcaatcaacacaactttgtcaatgattcctgtctgttccatgacaggtatgggttacacatatatgaccattttttcacaatttgcgatattgtgcagcttttacttgagcacatgggaagagtatcacacccacaaactttatctagctgaattctgcggtcctgttgaaggtattattgttttgtgtatttctttcattgcagtcggaatttacggacctcaaaccatctggcacactaaagtagcgcaattctcctggcaagattttgtgtttgatgttgaaaccgttcatctaatgtatgcattttgcacaggagcattaatatttaatattgtcacagctcatacaaacgtcgtgaggtattacgaatcccaatcgaccaaatctgcaactccaagcaaaactgcagaaaatataagtaaagcagtaaatggtcttttgccattctttgcatacttctcttcaatttttaccttagtcttgattcaaccatcttttatttctttggctttaattttatcgattggtttttcggttgcctttgtagttggtcggatgattattgctcatttaaccatgcaaccattcccaatggtcaatttcccatttttaatcccaactatccaattggtattgtacgcatttatggtttacgttttagattaccaaaaaggaagcatagtttctgcattggtttggatgggactcggcttgacacttgctatccatggaatgttcatcaatgatattatctatgacatcactacctttctggatatttacgctttatcaattaaacatccaaaagaaatttagctttcttgaaataaaactgaaagttttttatttgaaatatgtacaagtttatacatttgtttaaattaacct

SEQ ID NO: 2557 - DNA, 2133 bp, Saccharomyces cerevisiae
ctgaaaataaatctgaaaaatgtcaacgcactcaaacgactacttttctgcttcttccggaatggtctctgagacatcgtccgaggtttcttcgataaactcttcacagcctgtatcattctctaaggcttctattgctgctccggttccatgctctgatctacacagcaccaagtcgaacgatgcatcgagaaaattgtctattagtaggacgttaactaatcggctcaacgacattaaaaaggctgtcgatgacgacaacttgcagacggaagaaaattccgcagacgttaataaaatattagaatctagatttgacgtggccgatgccattaggctacagcacaatgagtcagtccagtcaaagttaaacatcccagtcacacacaccacgactgcaggcgcctcgttgtcggcaccatcttcctctgctttctctgcttcttctattcaaaatgatactacagaacataaagcttccatggactccaaactcatgaggaatagactatatccggcttccacgaaacactccggtaaggatcttgaggcccaaggaataaccgaattcgagcctgatgaaccgactgtaaaaaaagtattcaccaacaagtctaccgggcagctggaactgccccccgacggtggttatggctgggtcgtgacattctgtgtgttcttgaccatgttttccacgtggggctgcaacgcatccttcggtgtcgaccttgcctactacttaaaccatgatacttaccctggtgcttcgaagtacgattatgccttaattgctggcctaactgtctttctcggtcaactcttatccccccttgtgatggcactgatgagaataattggtctgcggaccaccatgctttttggtgatgctgtaatgcttgccgcatatctcttggcctcctttactaccaagttatggcaattgtatgtcacccaaggttttatggtcggttgttcaatatcactgattttcgttccagcaacaaccgtcttaccaggatggttcttgaaaaaaagagctgtcgcaatgggtgtctcattattgggtaccggtgctggtggtgtcgtttacggtttggctacaaacaaaatgctttctgactttggaaatacccggtggtgccttcgtatcataggcatatcgtgtagcataagtgttctagttgctattgcgctcttaaaagaaagaaaccctacacctgccataggattgaaatcgcctcgggccatgtttgaacagctcaaagcaatgttttcattaaaggttataactaagccatttgtggtacttattgcattatggttcatgttcgcattatttgcctacaatatgatggtttttactttatcttcatacgcaatctcgaaaggattatcatcgcacgacgcttccacattgactgccattttgaacggctcgcaatccatcggaagacctctgatgggtttagcgggagataagtttggtagggcaaacgtaacgatcgtattaaccactttgttaacaatatatatgtttgcgttctggatccccgctcatacgtttgttcaactcatctttttttcaattctagttggctcatgcgttggtgtcgccaacgtcatgaataccgttctgattgccgatatggttaaaccagaagagtttttgcccgcttgggccttcgtcaactactgtggtgcgcctttcttattggtttgtgaggtgattgcccaggcattgacggtggagaaagataagagcaatccttacttacatgcacaaattttttgcggttgctgctttattgccgcactaattttaatttctatccttcgtgaatattctatcaggatgaaattaacggaaagacaagctatgacaaacgagaagttaaaagaatggaaggcaagcgaatacgataccgattctgccgatgaagattggggtaaattaaaagaaagaaagactaaatatgaccttcttttaggtccgggcattaaaaaatacttcctaagaatggtatatccaatgaaggtctagttcttttcgacgacctgattcatgttatatacgcgatagttacgtcgcctactcatcatatcattagtacataatattcaatatctccgctt

SEQ ID NO: 2558 - DNA, 348 bp, Saccharomyces cerevisiae
atgaaaattagcttgcataacaaacggcaacgaggagaccaaaaccaaaacatgtctgttttcaatgtactcaaaccactacttaaaggttcaaatagtttcaaagtgaagctcaacggctttctattcaataacgtttctacaataacaataagaactttaatgaaaactcataaaggtacagcaaagaggtggaggcgtaccggtaatacttttaaaagaggcatagctggaagaaaacatggcaatataggctggtcccatagatcattaaaagccttaaccggaaggaaaattgcccatccagcttattcaaagcatctaaagcggttattaccctatcattga

SEQ ID NO: 2559 - DNA, 2002 bp, Saccharomyces cerevisiae
caagattcggaagtgaaattacagctcacatctaggttctcaattgccaatgaagagcttcattacaaggaacaagacagccattttggcaaccgttgctgctacaggtactgccatcggtgcctactattattacaaccaattgcaacaacaacaacaacgaggaaaaaagaacacgatcaacaaagatgaaaaaaaggacacaaaggactctcaaaaggagactgaaggtgctaagaaatctacagccccatcaaatcctcctatctacccggtttctagtaatggcgaaccagatttttccaataaggcaaatttcaccgctgaagaaaaggataaatatgcattagcgttaaaggacaaaggtaaccagttctttagaaataaaaaatatgacgatgctattaagtactataattgggcattagaattgaaagaagacccagttttctactcgaatttatcggcttgctatgtttctgtgggtgacttgaaaaaagttgttgaaatgagtactaaggctcttgaattaaaaccagactactcaaaagttttactgagaagagcttctgctaacgaagggctaggaaaatttgcggatgcgatgttcgatttgtctgtattgtctctaaatggtgacttcaatgacgcctctattgaaccaatgttggagaggaacttgaataagcaagctatgtctaaattgaaagaaaagtttggcgatattgacaccgctactgctactccaactgaattatccacccaaccagctaaagaacgcaaagacaagcaggaaaacttgccttcagttacatccatggcctctttctttggtattttcaaacccgagttgacttttgccaattatgatgaatccaatgaagctgataaagagttaatgaacggtttaagtaatttgtacaaaagatctcccgaaagttacgacaaggctgatgagtctttcacgaaagctgcaaggttatttgaagaacaattggacaagaacaatgaggatgaaaagttaaaggaaaaattggccatctcattagaacacacaggtattttcaagttcttgaaaaacgatccattgggagctcacgaagacatcaagaaagctattgaattgttcccaagagtcaattcatatatctacatggcattaatcatggctgatagaaatgactcgactgaatattataactacttcgataaagcgctgaaactggactcaaacaattcttctgtttactatcaccgcggccaaatgaatttcattttacaaaactatgatcaagcaggaaaagattttgataaagctaaggaattagacccagagaatatcttcccttatattcaattagcatgtctagcgtaccgtgaaaacaagtttgatgactgtgaaactttgtttagtgaagctaagagaaaatttccagaggcaccagaagttccaaatttctttgctgaaattttaacagacaagaacgattttgacaaggctttgaagcagtacgatttggctattgaattagaaaacaagttggatggtatttatgttggaattgcgcctttggtcggtaaagccactttgttgacaagaaatccaacagtagaaaattttattgaagccacgaatttattagaaaaagcgtccaaactagacccaagaagtgagcaagctaaaatcggtttagctcaaatgaaattgcagcaggaagatatcgatgaagctattacattattcgaagaatccgctgatttggctagaactatggaagagaaattacaagccattacttttgctgaagccgctaaagttcaacaaagaattaggtctgatccagtattggctaaaaagattcaagaaactttagctaaattacgcgaacagggtttaatgtaaacagtaaacataaacttaaaaacttttaggagaagacaaaaactaagtaacaaagtagactaaatgacaaaggaagagcagcaatgacattgacatctc

SEQ ID NO: 2560 - DNA, 3072 bp, Saccharomyces cerevisiae
tctaaataatattgctttgaatctgaaaaaaataaaagtaccttcgcattagacaatgtcactgccgctacgacacgcattggagaacgttacttctgttgatagaattttagaggacttattagtacgttttattataaattgtccgaatgaagatttatcgagtgtcgagagagagttatttcattttgaagaagcctcatggttttacacggatttcatcaaattgatgaatccaactttaccctccctaaagattaaatcatttgctcaattgatcataaaactatgtcctctggtttggaaatgggacataagagtggatgaggcactccagcaattctccaagtataagaaaagtataccggtgaggggcgctgccatatttaacgagaacctgagtaaaattttattggtacagggtactgaatcggattcttggtcattcccaagggggaagatatctaaagatgaaaatgacatagattgttgcattagagaagtgaaagaagaaattggtttcgatttgacggactatattgacgacaaccaattcattgaaagaaatattcaaggtaaaaattacaaaatatttttgatatctggtgtttcagaagtcttcaattttaaacctcaagttagaaatgaaattgataagatagaatggttcgattttaagaaaatttctaaaacaatgtacaaatcaaatatcaagtattatctgattaattccatgatgagacccttatcaatgtggttaaggcatcagaggcaaataaaaaatgaagatcaattgaaatcctatgcggaagaacaattgaaattgttgttgggtatcactaaggaggagcagattgatcccggtagagagttgctgaatatgttacatactgcagtgcaagctaacagtaataataatgcggtctccaacggacaggtaccctcgagccaagagcttcagcatttgaaagagcaatcaggagaacacaaccaacagaaggatcagcagtcatcgttttcttctcaacaacaaccttcaatatttccatctctttctgaaccgtttgctaacaataagaatgttataccacctactatgccaatggctaacgtattcatgtcaaatcctcaattgtttgcgacaatgaatggccagccttttgcacctttcccatttatgttaccattaactaacaatagtaatagcgctaaccctattccaactccggtcccccctaattttaatgctcctccgaatccgatggcttttggtgttccaaacatgcataacctttctggaccagcagtatctcaaccgttttccttgcctcctgctcctttaccgagggactctggttacagcagctcctcccctgggcagttgttagatatactaaattcgaaaaagcctgacagcaacgtgcaatcaagcaaaaagccaaagcttaaaatcttacagagaggaacggacttgaattcaatcaagcaaaacaataatgatgaaactgctcattcaaactctcaagctttgctagatttgttgaaaaaaccaacatcatcgcagaagatacacgcttccaaaccagatacttcctttttaccaaatgactccgtatctggtatacaagatgcagaatatgaagatttcgagagtagttcagatgaagaggtggagacagctagagatgaaagaaattcattgaatgtagatattggggtgaacgttatgccaagcgaaaaagacagccgaagaagtcaaaaggaaaaaccaaggaacgacgcaagcaaaacaaacttgaacgcttctgcagaatctaatagtgtagaatgggggcctggtaaatcttcaccctcgactcagagtaaacagaattcatcagtaggaatgcagaataaatatcgtcaagaaattcacattggtgatagtgatgcatatgaagtcttcgaaagcagttctgacgaagaagatggaaaaaaattggaagaactggaacaaactcaagacaactccaaattaattagccaagatattttaaaagagaacaatttccaagacggtgaagtgcctcatagagatatgcccactgaaagtaataaatctataaacgaaactgtcgggttatcatcaacaacaaatactgtaaaaaaggtacccaaagttaaaatactaaaacgaggtgaaacctttgccagtctggcgaatgataaaaaagcttttgattcaagctccaatgtgtcttcatcaaaagatttattacagatgctaagaaacccaatttcctctactgtatcttcaaatcagcaatcaccaaaatctcaacatctaagtggggatgaagaaatcatgatgatgttgaagaggaattctgtgtcaaaacctcaaaatagcgaagaaaatgcatcaacttcaagtataaacgatgcgaatgcaagcgaacttttgggaatgttaaaacaaaaggaaaaagacattacagcaccaaaacagccctataatgttgactcatactcgcagaaaaattcagctaaaggattgttgaatattttgaaaaagaacgactctaccgggtaccctcgcactgagggtggaccgtcaagtgaaatgtcaacgtcaatgaaacgcaacgacgctacaaataatcaagaattagataagaattcaacagagttattaaactacttaaagcccaagcctcttaatgatgggtatgagaatatttcaaataaggacagttctcatgaattactgaatatattgcatggtaataaaaacagcagcgccttcaataataatgtatatgcaactgacggatattccttggcatctgataacaacgaaaattcctcaaataaactactaaatatgctgcaaaacaggtctagtgcaataaatgagcccaacttcgacgtccgttcgaatggaacttcagggtctaatgaattattaagcattttgcataggaagtgaaagaataagtgttatacgttttatagacacactgtaaatgaaggcagccgaagcgatgtaaagtaaaatacattgctaaataaataaataaatacataaccatt

SEQ ID NO: 2561 - DNA, 2103 bp, Saccharomyces cerevisiae
agaaagaactgtaggcatcagagcgaacagatcatgaaggctaatggtttagataatgatccggcaaggacgggaatggaaagaacagatatagatagtgaacacccagaagcgcaaccgttgctgaacaacaaccaccggacccttggtgcaggatccgcgaatggcccagcagttaatgaaggtcgtgacattgaatccgatgggttcatcaaagatagtctctttcaaattcgcaaaggttatagaatctttattcataactccaaatggatattaaatatcctaattctaattaacaccatctggctagtcaccactttgatttcagatttctttttcaatatcaatattcttttcggattcagtaacaggtacgcaagttttaacgacttgactttaatattcatctcgatcatagctaattctttcaatctctggtttaataagctgggactgtactcagctttagattacagcttaaatgtaactctctgtgttttgacgttgttcaatctagcattgacctatctaattaaatacactaggcaaagaatcggctttgtgggcacgtttacatatttgtggacttcgttttcattttttattggggcaatattagattggtatctcttgttttacaacaactcaataaatgagccattggaggaacgcagaattgatgatgctaatattagtactttcaacgaaaaccatacaaatagtaccgaaaacagggacagaagccaatatggctctgggtcgccaacccccacccaccgctcgcagctggtccaaaacaaacatacattgacagaatgggtatccattgggttcaggaatactattaagtttttaattttaatattcttcgctttattcaccctgaatacacttttaacgacattggatacctacagattgactcacaaattaccaataaccgttcagtcgccctcgtacgaggcgttccattacgtagatgccgctaaaacctatcagttgcatataacttgttatggtgacgtatttgatcaagaaaacaacacagatttgtctgaaaataagaagcaacctatcatcttgtttgaacacggaggttatgatactggttacctttctgccacctggattgaggaactatatcatttagacaaaattcaaagatattgtctatacgatagaccagggtacgggttgagcgattctcctcccgccccaatctctattgcgatggttgcggaatctttaaggtacgcattgatcaaagatgcaaaaattaaaggtcccttcactacagtaggatacgaccttggcgggctatttacaagagtatttaccgccaagaatgtcgatattgtggatagcatgatgcttgttgaatcatggcatgaagaactattgttaaaaaactacattcaaagattactacctccaggccgtggtgatggcgacgatggcgacgatggcaatggtaatgatggggatggccgcaaccatgataagacttggttaccttcggagatagaaaggcataacgaatttagattatggtggaaaggcatttggtcgagtttaggatggagattacagacttcatggttactagctcatcatgggtctaaagaacgtatatatgggcgtgatatgaaatatcaaggacgtttcttgcgttccaagtttttggaaagcgtgacgagttcaattctaagttacagagatgtgacaaacaatgcagaatctttgcaaaatgtgaagacaagcatcgttagctctaaggaaatggtgaagaagtcggcattatggggcgattggcaaagagatttgaccaaaatttctcacaagactcaagaatggaaaatagttgaaggtgggcatgaaatatataagtatggtctgggcaaacaacaaactcaagaagtcctattaagattaataggtgagcttggcaaactaaccgaggattaaccgagttctttactttttttttagttttatatgtgaaagcaaaattgactgccaacgatggaggtattgtattcctgaaaacaataagtcaaatatgtaaacggcgcaaatatataaatactaagagaataatta

SEQ ID NO: 2562 - DNA, 635 bp, Saccharomyces cerevisiae
aatcaatcaactacaacataaaatatcaaacaatcatgcctaaagtttacagttaccaagaagttgccgaacacaatggcccagaaaatttctggattatcatcgatgacaaagtttacgatgtttctcaattcaaagatgaacatccaggtggtgatgaaattataatggatttgggtggacaagatgctacagaaagctttgtcgatatcggtcattctgacgaagcattgagactactgaaaggtttatacattggtgacgttgacaagaccagtgagcgcgtttctgtggaaaaggtatctacctctgaaaaccaaagtaaaggtagtggtacattggttgtcatattggccattttaatgctaggtgttgcttattatttgttgaacgaataatttttcttccagaatagcccacactcttctccaaactcaattgaatttttcgtttcagtttattaaattatttatttacaagcaatcaaggccaaattaatgtcttacaacattaacttatgctactatatcgcatagaagtatgtcactgtatcatagaatctgcctggcagatagaattattataaattaatatgtatatacttatctttgtgtatggctaaaaatcatcgtctt

SEQ ID NO: 2563 - DNA, 970 bp, Saccharomyces cerevisiae
ggttaaaatagtgctataaattatggctatcgaaaatatatacattgccagacatggttacaggtcaaactggctaccaaagggaccatatccaccaccgcccaccggtattgataacgatgtcccgctttcggaacacggtgttgaacaggcacatgaactggcgaactatatctctaaattagatgtcaaaccagaaatgattttctcctccccattttaccgctgtttagaaactagtaaacccacagtggaggctttaaagattccattatatgtcgatcgtggtgtaggagaatggtataagcctgatagacccattatcccggagcctgctactcatgaagttatgagtaagttttttccaagcatgatctctccagactgggaacctagtattattcctagtaataagggtgaaacagaagaagatatttttgagaggtgccataaattctggcctgtctttattgacagagtggagagaaaatttccaaatgtaaagaccattatgatagttacccacgcagccactaaatccgctcttggtatgaacttgttgaaattctccagtgccaaagagcccattgataacaaaggcacctttataagaaatggaagttgtgctattgataaatttgagctggtgaaaggagaaaatgaaagtataccatttgaagagagagagtggaaacttacaatgaatggcaacacctcctttttaactaatggggaagaaatgaattggacgtttatgaatgcctttgaggctggttcagacgctgatatcaaagcgagaagagcagctgagagcggaaaactaaaaatggagtgaaaactaaagtgagtcttgaattctgtacttctcattatacacttctgcatttgatttttatttcatgatgaagctgtgtgaatatatatatatatatacatatgtcaaagtctagtgtaaattgatagaattaac

SEQ ID NO: 2564 - DNA, 1964 bp, Saccharomyces cerevisiae
atggttaaagagagtattattgctcttgctgagcatgcggcctccagagcctcaagagttattcctccagtgaagctagcctataaaaatatgcttaaggacccttcctccaagtacaagccatttaacgctccaaagctatctaatagaaagtggccggataaccggatcacgagggctcctcgttggttatcaacagatttgagagatggtaaccaatctctgccggatcccatgtcagtggaacaaaagaaagaatactttcacaagctggtcaatattgggttcaaagaaatcgaggtttccttcccctctgcatctcaaacagatttcgacttcactagatatgctgtagaaaacgccccagacgatgttagtattcaatgtcttgtccaatctagagaacacttgattaagagaacggtggaagcattaacaggtgctaaaaaggctactatacatacttacttggcaacaagtgatatgttccgtgaaattgtttttaatatgtctagagaggaagctatttccaaggcagtagaggccaccaaactagttaggaaactaactaaggatgacccttcccaacaagccactcgttggtcctatgagttttcccccgaatgtttcagtgatactccaggtgaatttgctgtagaaatttgcgaagctgttaagaaggcttgggaacctaccgaggaaaatccaatcattttcaacttacctgctaccgtagaagttgcctctccaaatgtttatgctgatcagattgaatacttcgctacccatattactgagcgtgagaaggtttgcatctctacacattgtcacaatgaccgtggttgcggtgtcgccgccacagagttaggtatgcttgcaggtgccgaccgtgtagaaggatgtctctttggtaatggtgaacgtacaggtaatgtggacttggttactgttgctatgaatatgtatacccaaggtgtttctcctaatttggatttctctgacttgacctctgtcctagatgtggttgagcgttgtaataagatcccagtatcgcaaagagcaccatacggcggtgacttggtcgtttgtgccttttccggttctcaccaagacgccattaagaagggtttcaacttacaaaacaagaagcgtgctcaaggtgaaactcaatggagaatcccatacttgccattggatccaaaggacattggccgtgattacgaagctgtcatcagagtcaactctcagtctggtaaaggtggtgccgcttgggttattttgagatctttgggtttggatctaccaagaaacatgcaaatcgaattttctagcgccgttcaagaccatgctgactccttgggtagagaactaaaatcagatgagatttccaagttattcaaagaggcttacaactacaatgacgaacagtaccaagctattagtttagtcaattataatgttgaaaaattcggcactgaacgtagagtgttcactggtcaagtcaaagtaggcgaccagatcgtcgatattgaaggtacaggtaatggtccaatctcttctttggtcgacgccctatcaaacttgttgaacgtgagatttgccgtagcaaactacacagagcattctctaggttctggttcttctacgcaagctgcttcttacatccatctatcgtataggcgtaatgccgacaacgaaaaggcctacaaatggggtgtaggtgtctccgaagatgtcggtgattcttcagtgagagccatctttgccaccattaacaatattatccattctggtgatgtgtccattccatctttggccgaggtcgaaggtaagaatgctgcggcatctggctctgcataagaacttttctgtatttcaggacttattcgcttctatttatttctatacttatttatttacttcctttcctttttttttaaccatataattactagaagcacgga

SEQ ID NO: 2565 - DNA, 987 bp, Saccharomyces cerevisiae
cacctggaataacaagcttctctttccccttagaatgacatctaaagttggtgaatatgaggacgttccagaggatgagtcccgcctcacagaagagaacgtatccgtacctgaagaagaagtagaagacgaagacgaggaagaagacgacgatgatgatcatatatatatcaatgaagaaacagaatctggtcgcgaaaaggtcttggtatcacatgccccacaagaacgtatcgttccacctttgaatttctgtcccgttgaaagatacctctatagatctggtcagccttcacctgtgaatttcccctttttactaaacctaaaactgaaaacaattatatggctgtctaacgaagaacctcaagataccctcctagagttttgtgatactcatagaataaacttacaattcgcagccatcaacccggatgccggtgaggacgataatccatgggacggtctcactgaacattctataattaatgtactacaaacgatcgtcactcaagagaattatcccttgctagtgtgctgtggtatgggaagacataggactgggacagtcattggatgtctcagaagaataatgggttggaacttagccagtgtatccgaagaatatagacgctttactggtagcagaggtggtagaattcttgtagagttgcttatagaagctttcgacactaatttagtaaaaatagacaaaaataaagcaccaagttggttactgacagctttggagtagaggcaagaaaaaaaaaatgcaaaagataaagaaaaagcactgagctttatgaccatttacctaaagtttgaaatgtttcaggatgcacggcccattcgcgaaccaacttctaaagatcacacgaaatgaaattcaaaataaatgaaatttatttaatgggtaattttatagaatattaattatccgatttatatatggacatacttactatggacatgataatgaacaaaaaaaga

SEQ ID NO: 2566 - DNA, 784 bp, Saccharomyces cerevisiae
agagaaaccaacacactaaagactagacacataactgaccaatgtcctctgtccaatccaagatcttatcccaagctccaagtgagttggaattacaagtcgccaagaccttcatcgatctagaaagctcctctccagaactaaaggctgacttgagaccattgcaaatcaaatctatcagagaaattgatgtcaccggtggtaagaaagcactagtcctttttgtcccagttccagctttgtctgcataccataaggtccaaaccaaattgacccgtgaattggaaaagaaattccctgaccgtcatgttattttcttggctgaaagaagaatcttgccaaaaccatctagaacatctagacaagtccaaaagagaccaagatccagaactttgactgctgttcacgacaaggttttggaagacatggttttcccaactgaaattgtcggtaaaagagttagatatttggttggtggtaacaagatccaaaaggttttgttagactccaaggatgttcaacaaatcgactacaagttggaatctttccaagctgtctacaacaagttgactggcaaacaaattgtttttgaaattccaagccagaccaactaaatagtgagataactatcattctcatcatttgtcatacttaaagaaaataatattaagaaaaaataataaaaaaagaaacatagttatgagaatacaaaaggaggtttccaaaaagtgggcttttttaattcgagtaaaataattatgaatgtatacttaaatatattttg

SEQ ID NO: 2567 - DNA, 1162 bp, Saccharomyces cerevisiae
catagagttagtgggtattggaaaggccggtaaagataacagggatctctgaaaaatgcccaagttggaacaatttgaaataaaaaaatactggcaaatcttctcgggtttgaaaccaatagagaataaggtaaaccatgaccaggttttaccaattctttataattccaaattagattcatcggttctaaacaagatttggtttttagctgatattgatgacgacgacaatttagactttgaggaatttgtaatttgcatgagattaatatttgatatggttaataaaaacattagctctgttccagatgaattgcctgattggttgattccagggagtaaggtgaatctaatcaaagaaagaaagaagcgcaagcaaatagaaaacgcagacttgcctccaaagaaggaaatcaaagtagattggtacatgtctccagatgatttgaatcaatatgaaaaaatttataatagctgtgcaaaactaaccgatggtactattacattcaacgaactgtcaacaaaactttccacaaaattttttaacatcagtaagacagatttaaataaggtttggagtttaattaacccacaaaatttgccatcaattgatagagatcctactttttattttattcactgtttaagacaaagaaatgatttgggtgctgaaattccagcaagtttaccaaattctctggcggaggtgtgcaataaaaaacaactgagctatgatttacggtcctctcaacctcctacaaagagaaaagaagaagctaacgaagtggacaatctgcgtgacaatgggcagaactcgagttccgatagcagtggcagtaacgtgctttcaaatgaagacagtataaagcaaaaatatgcttctctgacagatgatcaagttgcgaacatgagagaacaattagaaggccttttgaactacaaaaagagtgaaaaaactcaaggaggctcaaaactttctaagcggattaacatcaggtcgataactgatgacttggataacattgaacagcaggttgaagtattggagaattacttgaacaataagagacacgaattgcaagcattacaagcagaaatcaattgacaccgataattaattttatgtacatgaatgtgtaatatttactgtttgttatttcac

SEQ ID NO: 2568 - DNA, 639 bp, Saccharomyces cerevisiae
agaagagacgattcaagagcaaatcaagtcgggtcttccatcaaaaccatggtcgttcacatcttgggtaaaggtttcaaaggtaaagaggtcattaaaatcgcactggcctctaaattttacggcataggtaaaacaacagccgaaaagatatgctcgaagttagggttctacccttggatgaggatgcaccaactatcagaaccccaaatcatgagtatagctagtgaactgtcgacaatgacgattgaaggagacgctagagcaatcgtaaaagacaatatagctctaaaaagaaaaattgggagttatagcggtatgagacatacattgcatctgccagttaggggccagcatacaagaaacaacgcgaaaactgcaaggaagcttaataaaatcgatagacgtggaattcacacattttctcaagcaaaagtacaacataatccgtccctttggtcttgtatctttggcaagtgattatactctccacatataaacaaattaaagccacgttcatattcttaatggctaagctttatgtcgtaatacatatatccatcaagcatcttcaatgcacgagtatattttgtgttgtcactccctgtatataatgtatttgttaattatataatgaat

SEQ ID NO: 2569 - DNA, 1269 bp, Saccharomyces cerevisiae
tttcttttttctttaagttttttttctcttcccttcccttcctttggtcaaataatcttatttgattcttcagggttttaaaaaaccagatgacgtggatactaagtactggtatgggccctcatgaggacaagtatgccaagcatgagcgagcgacctttaaaaagacgtacagttctatgaaaacgctgtctttgaatcatttaactgccaagcagcatatgctgatggccttatgcagggacatatcccttttaccgccgttaacttacatcttcacatctctgcggaaggcttggagagtctccatgcgcaccagcataacgctttacgagccacaatcactaagagatgcgttcacttatttctggcaaaaactcaatagcgcttacgacaataactcatcatttgaaggagcttcgcaaaaggctgtgaatggcgacggtaaggattcactcctattatccgcactcactacagcaagagcgtctgaatatctcctttgctcactttggtgcctggtgtctttatacctctcgtatgccattctcgactctttgatggtccgatggatcgtcaagtactctactgtggccgccattttaagaatgttttccatgtcattgatcattgtcaccttagaactccttcttttgtcgtctttgtctccggaactcgactattttttgcatacatggatactcattagttgtgtactaacagcagtgtacatttggcaaagttatcttacctcggatctgaggtatatcaggaaccaggaaggcgaagtacaagaggatactaatgttccagaagaaacagaagactatgaggatggtgaagatgacgctgatgaagactcacatgttgtggtagccgacgaaagtacagtagatgttccttccaacgacagtctctccgataacagtgatggcggattgtttcctgttaacaggccctcagtctctcattcacaaagccctaaaagacccaaaaaatatccaaaaaaagcattcaattttaccactaagcgaacgatagatctatataaaatcacggttctttgtgtcgtccctgtgggactagctagttttatcaccatgttaggtttactgcgaaacctgttcatccaaagattggatgtagagcaattagaaagaatactgcatgaaatgcatccccccgcatgaaaaaaataaaagaaaaatatataatatatatgtatatgtatatgctgcaacagctctaactatgtatctatatttacgc

SEQ ID NO: 2570 - DNA, 788 bp, Saccharomyces cerevisiae
ctcacaccccatacacacaaaaaaggcaacaatggacaaaatcagagaaaagctaagcaacttgaagttggaagccgaatcatggcaggagaagtacgaggagttgaaagagaagaacaaggacttggagcaagagaacgtcgaaaaggagaatcagatcaagtctttaaccgtcaaaaaccagcaattggaggatgagatcgagaagctggaagcgggactttctgactctaagcaaacagaacaggataacgttgaaaaagaaaatcagatcaagtccttgacggtgaagaaccaccaattggaggaagagatcgagaagttggaagcagaattggctgaatccaagcaattgtccgaggactctcaccacttgcagtccaacaacgacaatttctccaagaagaaccagcaattggaagaagacttggaggaaagcgacaccaagctaaaggaaaccactgagaaattgagagagtccgacttgaaggcagatcaattggaaagaagagtagctgccttggaagaacaaagagaagaatgggaaagaaagaacgaggaattgaccgtcaagtacgaagacgcaaagaaggaactggacgaaattgctgcatctctggaaaacttgtgatctacttttgttttttgttttctttttcttttccccaacacgctggtctttgttccttgttcttgagcaaatcaaacgctcatgggcaaacgaaactaaaataagaaccatttatacaaatacaatagcttagactatacatctgtatacttttccc

SEQ ID NO: 2571 - DNA, 1463 bp, Saccharomyces cerevisiae
tctaagtgctgtcaaaggaaactgccaaaaaagacggtatgtgcgtgtacaagtcaaattcgaacaacagcaacccttcttttatcttcgaaagaaccgtgcaagaggcaagttcaaacgatttatttcttcaacctccggtttccgcctccaacacatctcatagctcaagatctaatagtttttacaacttgcagaccatttctccgatacctatctctggtagcgaggttagaactccatcgttgaggaagaactccaataatgtttcctctccgctagataacgtcataccaacgtctaggtcggcgtcgaactccaccacaagctcgctagcacatcaagagtacatcttgaaccccatttgcaacatgcaaaatcatcaccatcgccgtcgtacgttagaaaactcggtggctccagctttagatgctagttgctcaatagtgaacgatgagaacactgacctgagcgatgtcgatatggtttattcaagaagaccttcctctgctgtgagcctaaacatggccctgttggctagaacgaatagtgccactcttccctcatcagaatcttcgccagcatcgccagatcttaaactttcgagatctcattcgcattctgcggctacacgtcccaccttgaataacatcaataacaccgggatgaccaccacaacttcaaatggcgaaccaaactccagaatactaagattctactcttacgtcgatatgttgaatgatgaaaaacttgcacaggccaataatacgcctacatctagaccacctatgaaatcccaagcgtactcatgccctttcatcctcaagaggtccccaccacaagcctattcttcatcgtcagcaacaacgacattttccaaccccttcatcaaaactacagaattaccagctacttcgccttatgtatctccgcagcaatctgcgagacaatattcaaataatgctaataacaatgcaaaatccccaaaaaaccggtcatcttcgatactatttcaaagacaatccattttatcaaacgttgaccctgttgcaaacatgcacaagaatcccaagttccaaatagaatcaagtgacagcgaagaagaagatttaaccatggacatgctagatccttcctttccgttaagttcgtctttgcgttcaagtgcaaacttggcaagtaatcccgaattagcaacccagacgcctttatcgacatcttcgtcatatacagcaataggcaagcccatgcctttatcaacagatccttcttacgtgtcttcttctaatacgttatcctccgaacatgagttaagagttgaaaaagtcagtgaagtgcttaagaaaaaagtttcaaatggtggattttcaactgaatttaatagttgtgatacataaatttcctttctgcacctcttcccttcgttcgttttgttcttttaaatttatgtcttcatatggtta

SEQ ID NO: 2572 - DNA, 735 bp, Saccharomyces cerevisiae
taaaagatgtctcaaccagtcgttgttattgatgctaaggatcatttgttgggtcgtttggcctccactattgccaagcaagtattgaacggtcaaaagattgtcgttgtcagagctgaagctttgaacatttctggtgaattcttcagaaacaagttgaagtaccacgactttttgagaaaggctactgctttcaacaagacccgtggtccattccatttcagagctccatctagaattctttacaaggctattcgtggtatggtttcccacaagaccgcccgtggtaaggctgccttggaacgtttaaagatcttcgaaggtattccacctccatacgacaaaaagaagagagttgtcgttcctcaagctttgagagttttgagattgaaaccaggtagaaagtacaccactttgggtaagttgtctacttctgttggttggaaatacgaagatgttgttgctaaattagaagacaagagaaaggtcagatccgccgaatattacgccaagaagagagctttcaccaaaaaggtctcctctgcttctgctgctgcttctgaatccgatgttgctaagcaattggcttctttcggttactaaatttcatgaaatgaatttgtgatcaatcttatcttttattttttgcaaaacaacaaaccaccctacatttttagttatttttatttattttgtttcacattttaaataatatcaataacagataaataaaca

SEQ ID NO: 2573 - DNA, 1524 bp, Saccharomyces cerevisiae
tgtagttcgtttttataaatcaaagtcacaaaaagtccttttccccatatatattaggcccgaacaagcgtcttatttgataactgttacgtatttatttttttgttatttgttaccatatcttttgatagaacataattaaaaattatccaaactgaattctacatcttccaacaacaataataaacgtccaaagatggttaaagaaactaagttttacgatattctaggtgttccagtaactgccactgatgtcgaaattaagaaagcttatagaaaatgcgccttaaaataccatccagataagaatccaagtgaggaagctgcagaaaagttcaaagaagcttcagcagcctatgaaattttatcagatcctgaaaagagagatatatatgaccaatttggtgaagatggtctaagtggtgctggtggcgctggcggattcccaggtggtggattcggttttggtgacgatatcttttcccaattctttggtgctggtggcgcacaaagaccaagaggtccccaaagaggtaaagatatcaagcatgaaatttctgcctcacttgaagaattatataagggtaggacagctaagttagcccttaacaaacagatcctatgtaaagaatgtgaaggtcgtggtggtaagaaaggcgccgtcaagaagtgtaccagctgtaatggtcaaggtattaaatttgtaacaagacaaatgggtccaatgatccaaagattccaaacagagtgtgatgtctgtcacggtactggtgatatcattgatcctaaggatcgttgtaaatcttgtaacggtaagaaagttgaaaacgaaaggaagatcctagaagtccatgtcgaaccaggtatgaaagatggtcaaagaatcgttttcaaaggtgaagctgaccaagccccagatgtcattccaggtgatgttgtcttcatagtttctgagagaccacacaagagcttcaagagagatggtgatgatttagtatatgaggctgaaattgatctattgactgctatcgctggtggtgaatttgcattggaacatgtttctggtgattggttaaaggtcggtattgttccaggtgaagttattgccccaggtatgcgtaaggtcatcgaaggtaaaggtatgccaattccaaaatacggtggctatggtaatttaatcatcaaatttactatcaagttcccagaaaaccatttcacatcagaagaaaacttgaagaagttagaagaaattttgcctccaagaattgtcccagccattccaaagaaagctactgtggacgaatgtgtactcgcagactttgacccagccaaatacaacagaacacgggcctccaggggtggtgcaaactatgattccgatgaagaagaacaaggtggcgaaggtgttcaatgtgcatctcaatgattttcttgataaaaaaagatcaacttattcacgattcatttattcatcatacttttcacttcaaaatacagttttgtagctatacatatgtaaagtaa

SEQ ID NO: 2574 - DNA, 1437 bp, Saccharomyces cerevisiae
atgaatgctttgacaaccatagattttaatcagcacgttatcgtccggctgccatcaaaaaattacaagatagtggaactaaagcccaacacctctgtatcattaggaaaattcggtgctttcgaggttaatgacataattggttatcctttcgggttgactttcgagatatattatgatggcgaagaggtttcatccgatgaaaatagagattcgaaaccaaagaacaaaattcccatcgggaaagtaaggctattatcgcaggagatcaaagatgtcaataatgataaagacgatggtcaaagcgagcctcctttatctattaaggaaaaatctgtgtctcttgaattgtctagcattgacagcagtgctacgaatcagaatctggttaacatgggcagcaaggcccaagagttaaccgttgaagaaattgaaaaaatgaaacaagaatctttatctagtaaagaaataatcgacaaaattatcaaatctcacaaaagttttcacaacaagaccgtatattctcaagagaaatatgtgaataggaagaaacaaaaattcgccaagtacttcaccgttgagtatttaagtagctctaaccttttacaattcttaatcgacaaaggcgatatccaaagggtattggatatgtctcaggaatcgatggggatgctgttaaatcttgcgaacatccaatcagaaggcaactatctctgtatggatgaaacgggtgggttattggtttactttctgttggaaagaatgtttggcggtgacaatgaaagcaaatccaagggcaaagtcatagttattcacgaaaatgaacatgccaacttggatttgctgaagtttgctaattattctgagaaatttattaaagagcatgtacacaccatttctctattagatttttttgaaccgcctacactacaagagattcagagcagatttacaccattacctaaagaagaagcccgtgcattaaaaggtggtaagaaaaactcgtactaccgaaaactcagatggtacaatacacaatggcaaattttagaactaacaggagaattcctatatgacggtcttgtaatggctactacactacatttaccaacactagtgccaaagttggccgaaaaaatccatggttcaaggccgattgtatgctatggtcaattcaaagaaactttgttggaattagctcatactttatattcagacctcaggtttttagcaccatcaattttggaaactagatgtaggccgtaccaaagtataaggggtaagctacaccctctgatgaccatgaaaggtggtggtggatatctaatgtggtgtcacagagtcatccctgctcctgaacctgtatcggaaaacgcgactgcagctgactccagtgaaaagcttgctgaacatggagctaagaaacaaaaaatataa

SEQ ID NO: 2575 - DNA, 1056 bp, Saccharomyces cerevisiae
atggttaagaaaaactttatcccgtctgtatcgctggtcagaagagaccttcctactttagttactactacaactagttcaaccgccctgtcaaagcccacgtcaagtgtagtgtccgaaacgagttccaagtcccttccatcgttaacatcttcggctttctcaacttccagtggagcaacatcctcctcatcactaattgtcgcaagtataacacccccatctacagcaggaaacccatttattttaaatgctgctgataaaccaaatggaactgtatacattgctgtgggtgctgtcataggtgccatttttatcagtattcttatatggtggttagtgtccagttatttgtctcgtcgtttcacaatgacaaattcttatgcaaatgatagtaaaaatttgtacaggggacaccacaagcatagttcttctttacaaagcaatccctttgacatcaatgatgagaaatcatatatgcaggatgattgggattctatgagccaattagaatctagccaatacgaggatgctgcctcaccattcaacccaattcaggatccgttcacagacaacagaagatccttatttatatctcctactttacaagtgtcacaatatgaaaaaagtcatagccgccatcaatcaaaagacactaacatttttattgacgatccatttttatacgtaggtacctatctagaagaagaagaagaagaagaagaagagagaaagctgaacctcaatagaccacaaagagcagcgtcacctgaaagaaaggaaaagaaaattaactcaatggaaggctaccataagagaaaccaatcctccttgggcctcataccagtcgcttctgctacctcaaatactagctctcctaaaaaggctcataaaagacaggcgccatcgatgtttttggatgatgtcctgaatggtagagaaataatctagataccctgacatctaagatacatggttgttcaggttaaacatttttttttttagtccttaaaaattgtgtaattcagtaccaaaaaaatcgatgtttgcttttat

SEQ ID NO: 2576 - DNA, 931 bp, Saccharomyces cerevisiae
ccaagcgtacccaaagcaaaaatcaaaccaacctctcaacaatgtctcctccagtttacagcgatatctccagaaatatcaatgacctattgaacaaggatttctatcatgctaccccagctgcctttgatgtgcaaacaacaaccgccaatggcattaagttctcattgaaggctaaacagcctgtcaaagacggtccactgtctactaacgtggaagcaaagttgaatgacaagcaaaccggcttgggtctaactcaaggctggtctaacacaaacaacttgcaaaccaaattagagtttgccaacttgacccctggtctaaagaacgaattgatcacttctttgactccaggcgtcgccaagtccgccgtcttaaacactacgttcacacaacctttcttcaccgcaagaggtgcctttgacttgtgtttgaagtcaccaacatttgttggtgacttaactatggcccacgaaggtattgttggtggcgcagagtttggttacgatatcagcgccggttccatttctcgttatgccatggctttaagttatttcgccaaagactactccttgggcgctacattgaacaacgagcaaataactaccgttgacttcttccaaaacgtcaacgcctttttacaggtcggtgctaaggctacaatgaactgcaaactacctaactccaatgtcaacatcgaattcgccactagatatttgcctgatgcatcttcccaagttaaggctaaggtgtccgattccggtattgtcactttggcttacaagcaattgttaagacctggcgtcactctgggtgtcggttcctctttcgatgctttgaagttgtctgaacctgttcacaagctaggttggtctttgtccttcgacgcttgaacgtatatatctaatatatatatgttcactatatacca

SEQ ID NO: 2577 - DNA, 2757 bp, Saccharomyces cerevisiae
tgaaccttcttccattaatgatcgacagctgcagtgaataatgtctcatcataagaagagggtgtaccctcaagctcaggtgccatacattgcaagtatgccaatagttgcagagcaacagcagtctcaacaacaaatcgaccaaacagcttatgcaatgggcaacctacaattgaacaatagggctaactcatttacacagctagctcaaaatcaacagtttcctggttctgggaaagtggtcaatcaactataccctgtggatttgtttacagaattacctccgccaatccgtgacctgtctttaccacctcttccaatcaccatttctcaggataacattgtgactccatccgaatattcaaatgttccataccagtacgtcagatctactttgaaagcggtgccaaaaacaaactctctgctgaagaaaacgaagttaccatttgccattgttattagaccatatttgcatttgcaagattcagacaaccaagtaccgctaaatactgacggagtcattgtccgctgtcgccgttgtcgttcatatatgaacccttttgtcgttttcattaaccaagggagaaaatggcaatgtaatatatgccgtttcaaaaatgatgtcccatttgggtttgatcagaacttacaaggcgctccaatcaacagatatgaaagaaacgaaattaaaaactctgtcgtggattacttggctcccgtagaatattctgttagggaacccccaccatctgtttatgtatttcttttagatgtttctcaaaacgctgtcaaaaatggtttattggctacttctgccagaaccattttagaaaacatagaatttctaccaaatcatgatggaaggaccagaattgctattatatgtgttgatcatagccttcattatttttacgttcctttggatgatgattatgaagtatcggatgaggatgatgaagaatcagatggtgaagaagaagatgaagacgaggaagaggaagacgttgataattcagaaacaattcaaatgtttgatattggcgatttggatgaaccatttttaccaatgccgagtgatgaattagtagttccactaaaatattgtaaaaataatctggaaacattgttgaaaaagatacctgaaatttttcaagacacacacagtagcaagtttgcacttggacctgccctaaaagctgcgtcaaatttgataaaaagcactggaggcaaagttgaagtcatttcatcaactttaccaaatactggcatcgggaaattgaaaaaaagaagtgaacagggcatattaaacacaccaaaagaaagctctcagctactgtcgtgtaaagattccttttataaaacattcacaattgagtgtaataaactacaaataacagtggacatgtttctggcatcagaggactacatggacgttgccactctatctcacctgggccgtttttctggtggtcaaacacatttttatcctggttttaatgccaccagtttgaacgatgttactaagtttactagggaattatcaaggcatttatccatggatatttcaatggaagctgttatgagagttcgttgttctactggcttgagggccacatcgttttttggccatttttttaacagatcctctgatttatgcgctttttccacaatgcctagagatcagtcttatcttttcgggatatccatcgaagactcattaatggcagaatattgctacttgcaagtgtcaacattgttgactctaaacactggtgaacgtagaattagagtcatgacgttagctctaccaacgtccgaatcagctagggaagtgtttgcatccgcagatcaactagccattactgatttcatgacacaaaacgcggtgactaaggctttgaattcaagcatgtactctgcgagggattttatcacaaaatcgctcgaagatattttaaatgcctacaaaaaagaaatttcgatgtctaatataaattcagtaacctcacttaacctatgcgcaaatttgagaatgttacctctattaatgaatggactaagtaaacatatagccctcagaccgggcgttgttccaagcgattaccgtgcaagtgcgttgaatagattggaaacggagcctcttcattatttgataaagagcatttaccctacagtttactccctgcacgacatgcccgacgaagtcggtctacctgactttgaaggaaaaacggttcttcctgaacctataaatgccactatatctcttttcgaaagatatggcctgtatttaattgacaattccgcagaattatttttatgggttggcggagatgctgttcctgagttactaatagatgtattcaatactgacaccatatctcaaattcctgtggggaaaagtgaactgcctcttttgaacgattcgcctttcaatgaaagactaaggaggataatcggtagaattagagaaaacaatgatacaatcacatttcaatcattatacataataagaggaccatctattaacgagcccgccaacctaaactccgaaaaagatatggcttctttaaggctatgggtattaagtactcttgtcgaagacaaagttttaaattgtgctagttatagagaatacttacagagtatgaagactagtatcaacagataacaatcagtctttctttaatctttatctttattaaccgatcatcatgtatagattttgatatacaatacagatagaaataaaagtaa

SEQ ID NO: 2578 - DNA, 1296 bp, Saccharomyces cerevisiae
tactctaccgtagatctatttcaacagtaccttaatattactggtaacaatcaaggttcattattctccctatcctcattcttctcccttttcctccataattgtaagagaaaaatgcttaacagaacaattgctaagagaactttagccactgccgctcaggcggaacgcaccctacccaagaagtatggcggtcgtttcaccgtcactttgatacctggtgacggtgttgggaaagaaatcactgattcagtgagaaccatttttgaggctgaaaatatcccgatcgactgggaaactataaacattaagcaaacagatcataaggaaggcgtctatgaagctgttgagtctctaaagagaaataagattggtcttaaggggctatggcacactcctgctgaccaaacaggtcacggttcactaaacgttgctttgcgtaaacaactagatatctacgccaatgtggcccttttcaaatccttgaagggtgtcaagactagaattccagacatagatttgattgtcattagagaaaacacggagggtgagttctcaggcctggaacatgaatccgtccctggtgtagtggaatctttgaaagttatgactagacctaagacagaaaggatcgccagatttgcctttgacttcgccaagaaatacaacagaaagtctgtcacagctgtgcataaggcaaatatcatgaagttaggtgacggtctgttcagaaatataataactgaaattggccaaaaagaatatcctgatattgacgtatcgtccatcattgtcgacaatgcctccatgcaggcggtggccaaacctcatcaatttgatgtcctagttaccccttcaatgtacggtaccatcttaggcaacattggcgctgctttgatcggtggtccaggattggtggcaggtgccaactttggcagggactatgctgtcttcgaaccaggttccagacatgttggtttagatattaaaggccaaaatgtggctaacccaactgccatgatcctttcctccacgttaatgttgaaccatttgggtttgaatgaatatgctactagaatctcaaaggcagttcatgaaacgatcgcagaaggtaagcataccactagagatattggtggttcctcttctactactgacttcacgaatgaaatcatcaacaaattatctaccatgtaatgaaaacaattccccttttttttgttctgcaacttaagtgtgttcaaattcttatctataattatatataaacatacactaaaatataagtatatacca

SEQ ID NO: 2579 - DNA, 1422 bp, Saccharomyces cerevisiae
cttactgtgtaaataaaaactacttaagttcgagaatctcaaattaacttctagagcatggctagttattctttagttgaatcgaattctttcgggtcagaaaattggtgtcttaagttacagcctagttataaacatggtcttttaactggattaagtaatggcgaaatacgtttgctagactggagtactggtaaatcagtacaaaagattaaggcgagcgaaactgcaatcaatgatatgaaggtcatcggtagcgacttctctgctggtcatctagttagtagcgcctctatcgacgcggtgaaagttttcgatataaggacgaatgaccgcattgctcaaattcaaaacgaggccaactccccctttatttccttagattctcgtcatggtctattggcctgtggtaccgaattgcagggaattgacgctgctgtatacatatatgatattcgcaaatgggacactccattgagatcattaattgactctcaccatgatgacgttacctgtattaaatttcatccttctgacgtcaatattttgctcagtggttcaactgatggttacacgaacatttatgacttgaaacaagatgaggaggaggacgctttacaccaagttattaattatgcgtcaatacattcctgtggatggttgtccccaaagaggatatttacactatcacatatggaaacatttgcaattcacgaattgaacgacaaatctgacgaattgaaagagccacaacccttggactttggtgatgtaagagaaatatggaactgtgactacgtggtagatatttaccctggactcattgcaaccggtaaaacccaagaaaattgtggagagttgtgcctcctaccatttaaagatgagaaggtggatactgaaaacggtattgttatcccacacgcccatggagacgaggtcgtcagagatatttttataccagcacaacatagcaacatgttatactcctgtggtgaagatggttgcgttaaaatttgggaaaacaaacaggggccgttagatattccagaaaatttttgggattactctaaaaaaatgaacgtcttaggagatgacgacagagaaggttccattaatttagacgaacctcttattattcaaaaagaatcggtttccacgaggccaaggaaggagaaacacaagaaagccaagaaacattccatgaaaagtcgtttcaaaccatactagtttcataaagacaatacatctaaagagatgcctaacatctgcaagagatttcggcagaactactctataacttaaaaaacgaagcatacattccaaacaagttgatacttctagatcatagtttatcttcatagggcttcttttgttggtacaatgttataacaactatatttctgctatatagagtattaatgc

SEQ ID NO: 2580 - DNA, 663 bp, Saccharomyces cerevisiae
aaaggatccaagcaaacactccacaatggccagaactaaacaaacagctagaaaatccactggtggtaaagccccaagaaaacaattagcctccaaggctgccagaaaatccgccccatctaccggtggtgttaagaagcctcacagatataagccaggtactgttgccttgagagaaattagaagattccaaaaatctactgaactgttgatcagaaagttacctttccaaagattggtcagagaaatcgctcaagatttcaagaccgacttgagatttcaatcttctgctatcggtgctttgcaagaatccgtcgaagcatacttagtctctttgtttgaagacactaatctggctgctattcacgctaagcgtgttactatccaaaagaaggatatcaaattggccagaagactaagaggtgaaagatcatgaatataaagcgggaatttttttttttctatgcatttagactggggggacatcatacaaacatctccttttttaatacattattcatctatctattcgcaatgcttttaacgacatgaggagggtatatatgctgtaatttatcgtttacagacataattgcggggctaatttttagatgcttagatagtatacgtaattttataaccggcaagaaaccatgtataata

SEQ ID NO: 2581 - DNA, 1608 bp, Saccharomyces cerevisiae
atgttgctaataagaaggacgataaatgcatttctgggatgtatccattgcaatcttacggcgacgtgcatcctgattgccttcgtcataaccatgtatgtggtacttgtatctgagcctgcatccgtagacggaactatgggaaattttcttccgttttccaagatggatcttgcgacgaagagggacagacccttttattcgaattgtgtgaatactcaggactatttgttgaatccatcgtacatcaagcagaatgcctcgtttgtcatgctaacaaggaacggggagctagaagatgttatcaagactatcaacagtatagaagagcatttcaatcagtggttccactatccatatgtgttcttaaatgaccagccgtttgaagaggacttcaaagcaaaagtacgtgatgttacagtgggcgcgctggtggaatttggcactatcgatgagatatcttggaattttcccagtgacgtaaaggatacgttcgagttctacaacgcaattgaggatcaaggtgatagaagcatactttacggaaacttagaatcatatcataagatgtgccggttttattcaggattattttacaagcacccgctagtacagaagtacgaatggtattggagattggaacccgatgttgagtttttctgtgatattacctacgatccctttttggagatgctccgaactaataagaaatatggatttacgatcatcatccccgaattgtattggacagtcccaaatttgtttagacacactaaaagctttatcagtcaaaaaggcgttacgcttgggtcattatggaaactatttacaaaggattacgacatttttgaatccgatgatccggagttacgggactggatcaactatgattttcaggccaaggctaagatatccgaaaagatagccatcgagcagcttttgaaaaagggtgatgatttccaacagataaatgatgacaaagagggaataatgaatttgatacataaggctcgctctaggaagcatatcgtagaagacaaatttttcaatgaagagtacaatctatgccatttctggagtaattttgagattgcgcggctaagcgtgttcgacaatgacatttacaacagtttttttcaatatttggagaaaagtggtggattttggaaggaaagatggggggacgctcctgttcactctattggattgtcgctaactctggatttggacgatgtacactattttagagacatcggatatagacactccacaatacagcattgtccacataatgccatggggaatgaggaattctcctacttagccagtgactcaaaattcaaacgtaaaaacgcggcctacgacgagggaagggaatttgggtgtggctgcaggtgcagatgtcccaagaaaaagcgtgaaattgaggattccatgggtttctgcgtaaatatttgggtaaatctgcttaaccaacagaggggacacgaacgccacgtcgaagcactcaacggcaatgaaatggaggagcacataagggaagactatctaagacagttcggaaactagtttcttttattgagacttatttttaatatatatagtaca

SEQ ID NO: 2582 - DNA, 533 bp, Saccharomyces cerevisiae
tcgtttgcaaaataactagagagccggatcgatttactttgcaaagttgcgtcctttttccacgacagaatatgtctgcattatttaattttcgttctcttctgcaagtgatattgttactgatttgttcatgttcttatgttcatgggcagtggccgtctctcctagatcgttacaaaaatcatgaggttttgggggccttctggaaaatggcacgtgttggtgaaagggccagtccatatgttagtttagcatgtattttgatggccatcagtcaatttaacagctgattggaagatacttagtcatatggatttaaagttacgcaaatcaaggtcatagaaggtgcagtaccttttaaaacaaagagtataagtggattcagacgaagtgtctctttaattctatcgtctgatagcgtacaagtaagggtgctatgagctagcacgcacagcaaaaatataaacacttttgtatttttttttattttatagtgttttgtgttgagtattcatctattcgacctctataga

SEQ ID NO: 2583 - DNA, 3111 bp, Saccharomyces cerevisiae
gagactgctctaatctatttgcagtcgtaggcattacaaatgaccgaacatgagtctttaggcctggagcaaaatcaagacggcggtgacacttatagacatcacaacctaagcgatgggtgtatttcgagtgttgaagacgccaacgagcagcctagttcgtatgaagaggaaagtgatgatgatatgcaatattacgaacgtgcgatccaggaaatttctagcggtgactcatatgtttgtatgatttgtacagtagagatggattatacgtgccaaatgtttgcttgcaagagatgttatagagtgtttgattacggatgcataagagaatgggcgttaaaatcaacggaaaaaaccgtagatagaatatggaaatgtccaaactgctattatgttagcaaaagagttccggtaaaaaatcggcccacatgttggtgcggtaaagttgttaatcctgatccgaatccgctggatcctaactcatgtggacaaacctgcaatgcttctacttgtatgcatggttgttccaaaatttgtcatctagggccgcatccagagtgtactagaatggtcgagattatgtgccactgtggtaagcattcgaaaagtatcttttgttaccagtctaaagttatgaaaaaaaacttcaactgtcaagaagtatgtggattgcctttatcttgctccatccacacctgtaaaaagaaatgccaccctggcttatgtgggccatgtccagaaatgataattagtaaagatagtccgaaaaagcaaataaaatgctactgtggtaaccacactcgtgctaacataaagtgtagtgaaacaaagtttcccaagtccggtaagtcgtcgaaggatgaaaatgggaacaggtggataggcgtgtttgcctgtgcagataatagagttgtcgactactcatgtcgcaagcattcattcatagaatcttgcataagcccacccacaattaatggagaaaaggcatgcccatttttgcctagctctttgaaaacttgtccctgtggccggacagccctagaggaactgactaagcctcgtaagcattgtgatgatccgataccaacctgcgactcaagatgcggtaaaccactaaaatgtggcaaacattcgtgccccttcacttgtcatgataaagcctgtatggaaccctgcttgcaaattgatagtgtaaaatgtgcttgtgagcaaagtacattttcagttccatgtggatttcaaggaaggcctcgctgcaatattaaatgcgaatccctgatgtcatgccgtagacatagatgcaccgataggtgctgcagtggtaggccatcggcgataagaaggaagaaaaacttgttcagaacgcaagatttgttggatgagtctcttgtggaagcaaaacatatctgcctaaaaccgtgtaacttgaccctatcatgtggaattcataaatgtcagagaaaatgtcacccaggaaagtgtccgccctgtttagagagtgattcgaacgatctggtctgcccatgtggcaatacagttgttcctgcacccgtgcgttgtggcacgaagctacctacatgtaatcatccatgtattaaagttgtgcgtggcgaatctacgtgtggtcataaaccaatgccacatacctgtcattccttggatgtgtcgtgcccgccatgtacggaaaccgtatttaaaccttgtaaatgtgggaagaaaactaaagtgagaacggtttgttttcaaacagacgtatcatgtggaataaaatgtgggataccactctcttactgttatcatacctgccaaaaaacatgtcatttaccaggaaattgccaaaaggtgtgtaaacagacctgtgggcaaaaaaggctcaattgtaatcatgaatgtcctaaaccgtgccatggtaagacagagtgtcccgatttaccttgtgccacgctagtgaaaatttattgtaaatgtggaaggatcaaaaaaagtgttacttgtggcgcaaaaagtgatagagtaagtgtaactgaatcttccgtgctggattgcaatgaagaatgtgaagctttgaaacgactaaaggaattgaaggaggcatttggaattaaggaagaaaccaataattttacaagtaatgaactagatgcgttaaaaaaactggtctctgttgctacaacatttgaagaactgcagttaccgtttacagaggcagcattatcagtatattcaaagcaagaaagatggtgttcacaaattgaagctattcttaataaattaatggacgataaaacacgttcaagcttgcatttcaaacctatgaggcctcctcaacgccacttcatccgtgaactagccaaagcttacggcctatattccgagtctcaggacagagagcccatgagatctgtatttattaagaaagaagataatggcgcaagcaataaaccagtcttatcattagcagaagcttacccactatatgaatcatttaaacaattgcagaaggaaaggaaagcacaagaatttcaagctcgcaccacagctaaactaatcaacttcgaggttcaagatacggaacctaaagtagaggtggctaagaaaaatggttttttggttcaaaatttggttgctggaaatactgccgaagatctaaggagattttttgaaccacatctcaagcatacgttagtagtgaatcctcaatacctaatccttgatgatggcaaaacagcactagtgtatcctgaaaattacgaaacagcatccgtgaataccgaacgtgacatggagcttttggttggacacttcgattttatggccaaagaggcatttttggccgattccatttcgttgtgttcaactgaagaagaacttgaaagaaggttggatacgcccgtaattcaagaggatagtcctgtaatggataataatacatgaactataatagcgtgtcattatttattacgcggaattctaattaaatagaaatatctaacttttattttttttcatcctatctcatttcttgtttctccctgtcgttgctaaaatacgaggatctgcatatgtttacatatcaacgttcccgtaaacgaatggagaatactgagt

SEQ ID NO: 2584 - DNA, 1552 bp, Saccharomyces cerevisiae
acgaaaaagcatgaatttctacagggatgcaacatgggtgctagaagatattgagaaggaggctgcaaaagaaaggatttccggctctatgcagacgctggtactgaaaagctgtaaaagatataagctgaaaagtaatccaaaacatatttatgcagttctcgattcgtgttggaaatataaaccatatttggagaaagtgatgaaaaaggcacacatattggaagatatacccaagaaaaagggcaaaccactcttttcaaggctaactttgttattgctttgccatgatttgctgttgtctaagcagaaaagaattcaaatgggcaaacaccccatcaaagattatgttttgaagtttaagagcccattgcatagcgaaatggtcaaattgaaactcaaattgaaagtaagagagctatctgagttggtattaagcgaggatatttccaatgaccttcctcctgttagatggattagaatcaatccattaaaatgccatccaaatggtgagactgagccggtgttagccgaattgaggaagaagtttactttaaaggtagacaaatggtctgaactagttcctgggtctatctattatgatgagtttattccaaacttgtttggaattcatccgtctgacaaaattacagcacatgagctttataagcatgggaagattatcattcaagatcgtgcttcttgttttccagcccacattttgaatccaggaccaagtgatattgtgatagattcctgctctgctccaggtaataagactacccatacggcctcttatatatatcccgaaccaccgaaggacaataatactcgaatatacgctttcgagaaggatcctgaaagagcaaaagttttacaaaaaatgatcaagatagctggctgttctcccaacatcagtgtcaatgtaggtgattttacaaagctcgctactcctgaaaaatataaggacgttacttgttttattgtagatccgagctgctccggtagcggtatatttggtcgtaagttttttgactcatttaatagaaggaaaattgatgataaagatgacgatggtggcattgtgccggatgagcaagaggagtttatagcaaaggaagaactacagacaaggttagcgaagctgagttcatttcagttccagatggtaaagcatgcaatgagtttcccagcggctaaaaaaatagtatacagcacatgttccattcatgcggaagaaaatgaacgagtcgtcatagaccttcttttagataagtcagttagagaatggggttggaaagtagcgccaaaaagagaagttattccttcttggcctagaagaggcaaggtagaagagttcgaagaggtttttagagatggagtcacctatgaccctcaacagcttgccgagggttgtatcagggcactaccaaaaagtgacggtggtattggtttctttgctgtctgttttgaaagagattaaactttcagaacattcatgtatatatgtgtatatctgatatgtattattgcatttttgctgtagtactac

SEQ ID NO: 2585 - DNA, 2010 bp, Saccharomyces cerevisiae
atgttaagcaattgctccataacacgagatgtatttagcttttttcacaacaagactggaaatcttaattacctagataacacaactcagaaaccggaagtttttgtaagtccaaattctacaatagtttcagccccaactttggactcttttcaagcattgatggagaaaggtaacttcaccactttgcaactagctaaggtaggaattagaatgtttttctcctattcggtaagtaagtatgctgttctatgttttagtaccgccattattttgaataggttgactgtaatgtcttcattgagatcaaattctacaaacattcgtttacctctttggtcaaaaactttgctccatttagtagccactctttcactggttaaagcacttttacaaattctgagtcaatttggactcatgcatgaactgcacgtgagtgatacagatttttatgctttaagtgtctatttatttgtagctctgtctgactgcattgaaatttttatttcttcaacgacgaacgttccttcattaatatgctctgatttttccatatggggtttatcattgaatctttatatcatatccaaaatgcccgcggggcagcagcatattggcgataatgttgaactactaggagcggtttttcacagattagtaattcatttggtagaattgtttcatataagagcctatagattatgtggagaagttatattaaacgcgggtttttttaccgcattcgtcactaggacctatttgaacggattagattttattaacatctgtctcattcacaattatttccctggctttttctatatttccaccatattactggcgtctataggcattttcctgaaggctttgttcaccagtaatccgttccgatcattatattcaagatataaaaacttggaaaaatggtggagatcaaataattacaatggagaagaggagtttaacgaaatagctctttcattgtgtctacttttaacgtcgaatgactataaaatatttaagaaatcagacaacgtaaaatccgttgatgaagtcgctgctttcagtaatagttatgtggttagtggacatttaaaccaactccagtcgacaccagaggatctgttatctcgtaaggaaatgactaccgattcccagttaccaggttttgcgaggacatatttaggcctttttgaattagtaagaaccattattttgacgtattctagactcctaaaaaatcttctgtggagtaaaaattttgagagcagtatagataagaaaccgagagtgggaaagcgtaaaaagagggatttaaacaaatatgttacagaaaaaaactataaaaagtttttatataaaccggacgtcaaagagcttaatattgagagtgatctcagaagcctggagttattgcttcctgaagacgattcatcaaaagactactttccccccagaaaaatcgatgaaagtgtttcagatgaagagtttgatagtgatatggaaagtcagttgattattgatgaagaaaaagaattaacacatttatcaagtaatgctgtcgattctgatgatttagaggaaatagcctggaacatctccatgtggtctattttaaattatgaaatggatgtccataataaggttaatggaccgttgactagatcacaatatggtaaaagaaacccacaaggtgtactagtcgatgttgttattgaacgccttctgcatcatacaaactccaggtatatgtacaaacgtttaaatatgaaggacgatgacaaattagagttcaagtttgattttgcctttgatagttgcgacgaagtggaggaaatggatctctcctgcctaatctgcaaagttaataaaagaaatattgtaacttggccctgtagatgccttgcattatgcgatgattgtaggatatctctgggttataaaggatttgctacatgcgtcagctgtgatagtgaggtgaagggttacagtaagttgaatatagtctag

SEQ ID NO: 2586 - DNA, 1213 bp, Saccharomyces cerevisiae
ttagaattgtataaccatccagaaactcttcagaggataaaggataagttgtttgcattttaagattttttttttaatacattcacatcaatataatagagtatagtatacagaactaataatggtcaaggagacaaaactttatgatttacttggagtatctccaagtgctaatgagcaagaactgaaaaagggttatagaaaagcagctctaaaatatcatccagataagccaacaggtgacacagaaaagtttaaggagatatcagaggcctttgaaattttaaatgatcctcaaaaaagggaaatatatgatcaatacggtctcgaggctgctagatctggtggtccaagctttggtcctggtggtcctggcggtgctggaggtgctggaggcttccctggcggtgcgggcggattctccggaggacatgcgttcagtaatgaggatgctttcaatattttttcacaattctttggcggcagttccccattcggtggtgctgatgacagtggcttcagtttctctagttatccatctggcggcggtgctggtatgggaggtatgcctggaggaatgggaggaatgcatggcggcatgggaggtatgcctggcggctttagatcagcatcaagctctcccacgtatccagaggaagaaacagttcaagttaatttaccagttagtctagaagatttgtttgttggtaaaaagaagtcatttaaaattggaagaaagggcccacatggggcctctgaaaagacacaaattgacattcaattaaaaccgggttggaaagctggtaccaaaataacatacaagaaccagggtgattacaatcctcaaacgggccgtagaaagactttgcagtttgtcatccaggaaaagagccatccaaactttaaaagagacggtgatgacctaatttacactctgccactatctttcaaggaatcattgttaggtttttcaaaaactatccaaacaattgatggcagaaccttacctttgtcgagagtacagcctgtccaaccctcacaaacttctacttatcctggtcaaggtatgccaactccaaagaacccatctcagagaggtaatttgattgtaaaatataaagtggactatccaatatcactaaacgacgctcaaaaacgtgctatagatgaaaatttttaatagtaatcctaagcaaatataattataaactca

SEQ ID NO: 2587 - DNA, 1239 bp, Saccharomyces cerevisiae
cagtttgggtggtcataatatttcaagcttaacctaaggtgagaatatgtggaatcctattttactagatacttctagtttttcattccaaaaacatgtgtctggtgtgttccttcaagtgcgtaatgccaccaaaagggctgcgggctcgagaacaagtatgaaggattctgcaggaagaaggttaggaccaaaaaaatatgaaggccaggatgtttccacaggtgaaattattatgaggcaaagaggaacaaagttttatcctggagaaaacgttggtatagggaaagatcattccatattcgccttagaacctggtgttgttcgttactatcttgatccttttcatcctaaaagaaaattcattggtgttgccttgaggcgtgatttgaaactgccatctcctcattttgagcctaccgtaaggaggtttggccgttttgagttaacaaataaaagggcagcatataaggaagaaaattctatttctagaaaagactatctcgcaaaacctaatattttgaagcagttagaggtcagggaatctaaaagaaaggagttacaagacaagttgagtaaggttcttcgggatgaacttaagttagatataaaagacatcgaattggcaacgtcatacttaattcgtgtaagggcttccctgaagaatggataccccatagaagatgcaaggttcaatagtagatattatttaaaagaagaagagcgtttgaaggcaaggagagaaagctggacgaatgagaaattgtcggagagtctatccaagattgatgagtgtagtgatcttttgaactcatctacatctttcaataacaagctagagctacaccagtatatttcggaacaagaaaaacaagctttgaaggcaaaactattagaggacctagaaaaatcccaacacttagaaaccaaaaaagacaagaattatattaaggcgcttttcaaggacgcttgtaattttttgactttatctgaagaagtacatttgcgtaggaaatacttaaagtcggtcttccccgaaacagatagtacggttgaaaccaaaagcgggaagaagtcaattgtgtctagacgttttgattacaccaaaaataaagttgaagtcattgctagaagtaggcgggcttttttgagcaagctttgattttctttccttacgcacagtatgtacacatataaaatgtttaagaatgcctgtaaatattactattttgtcgcgca

SEQ ID NO: 2588 - DNA, 1060 bp, Saccharomyces cerevisiae
gacacaccgatgaactaaaattcgctttgaaaagtttgctatgaatactttttttctttccttgctaagtggcgccgctgctggtacctctacggatttggtttttttccctatagacacaattaaaaccaggcttcaagctaagggtggattctttgctaatggaggatacaaaggcatatatcgtggtttgggaagcgctgttgtagcatcggcgccaggtgcttcacttttctttattagttatgattatatgaaagtaaaatcaaggccatatatcagcaaactttactcacagggatctgagcaattgattgatacgacaacgcacatgctttcctcttccattggtgaaatttgtgcttgtcttgttcgagttcccgcagaagtcgttaagcaaaggacgcaagttcactctaccaattcttcctggcagactttacagtcaattctacgaaatgacaataaggaaggtttaaggaaaaatctttatagagggtggtctaccaccattatgagagaaataccgtttacttgtatacagtttcctttatacgagtatctaaaaaagacttgggcaaaagccaatggccaaagtcaagtggagccatggaaaggggctatctgcggttctattgcgggtgggatcgcagcagctacaacgacaccattagatttcttgaaaaccagattaatgctcaacaaaacaaccgcctcacttggaagcgttattattaggatttacagagaggaaggtcctgctgtatttttcagtggagtggggccccggacaatgtggatcagtgcaggtggtgctatcttcctaggcatgtatgaaactgttcattcgttattatcgaaaagtttcccaacggctggagaaatgagagcgtaatgaaaacatagagcaaaagcaactaccagttgtaagaggtagatcgtttacgtactttacgtaagccttctgaggcctcttgtctgttgtttattttttgttattcatataaaaaagtcgtctatttacgatatctgttcaaagtacttttttggatatttgtta

SEQ ID NO: 2589 - DNA, 1046 bp, Saccharomyces cerevisiae
gggaaaaagaataagatatacaagtcacaatgtcttcaactcaagacagtaaagcgcaaactcttaattctaatccagaaattcttttgaggaaaagaagaaatgctgatagaactagaatcgaaagacaagaattagctaagaaaaagagggaagaacaaatcaaaaaaaagagaagtaataagaacaaatttgtcagagctgaaagtatagttgcaaagactttggctacctctagggaaaaggaaagaattaaaagagtgtctatattagaagataagaaggcaaagaatgaaacgcagcatattgcatctgggaaagattttattctgaaaataacagaaaaagctaatggcgccgaagagaactctgtcgacttggaggagactgaagaagaagaagacgatggtttaatcagagaaaagactacttacgatggcaaacctgctttacttttcattgtcagagtaagaggtccgcttgctgtaaatattccaaacaaagcatttaagattttgtctttgctaagattagttgaaactaatactggtgttttcgtcaaattgaccaaaaacgtatatccgttgctcaaggttattgcgccatacgtagtgattggcaagccttctttatcttctatccgttccttgattcaaaagagaggtagaataatctataagggtgagaatgaggctgaacctcacgaaatagttcttaatgacaacaatattgtcgaggagcaattaggagatcatggaataatttgtgttgaagatattattcatgagattgccactatgggtgagtctttttctgtttgtaacttcttcttacaaccattcaagttgaatagagaagtatctggatttggttctttgaataggctaaggaaaataaaacagcgggaggctgaatcaagaactcgtcaattttcaaatgcagctacagcaccagttatcgaagttgacattgactctttattagccaagttgaattaattaagagagtattttaaaattgtatagtacataggttgttagttatct

SEQ ID NO: 2590 - DNA, 84 bp, Saccharomyces cerevisiae; identical to SEQ ID NO: 234

SEQ ID NO: 2591 - DNA, 74 bp, Saccharomyces cerevisiae; identical to SEQ ID NO: 232

SEQ ID NO: 2592 - DNA, 71 bp, Saccharomyces cerevisiae
tccaacaagtttaatggtcagaatgggcgcttgtcgcgtgccagatcggggttcaattccccgtcgcggag

SEQ ID NO: 2593 - DNA, 568 bp, Saccharomyces cerevisiae
atacttaccttaagatatcagaggagatcaagaagtcctactgatcaaacatgcgcttccaatagtagaaggacgttaagcatttatcattgaactataattgttcattgaagtcattgatgcaaactccttggtcacacacacatacggcgcggaaggcgtgtttgctgacgtttccattcccttgtttcaatcattggttaatcccttgattcctttggggatttttgggttaaactgatttttggggccctttgtttcttctgcctggagaagtttgacaccaaattcaaattggtgttaggggagctggggcctttcaaaagagagctttgtagaggcattctttttgactacttttctctagcgtgccattttagtttttgacggcagattcgaatgaacttaagtttatgatgaaggtatggctgttgagattatttggtcgggattgtagtttgaagatgtgctcttttgagcagtctcaactttgctcgttcccgttatgggaaaaattttggaaggtcttggtaggaacgggtggatcttataatttttgatttatttt

SEQ ID NO: 2594 - DNA, 97 bp, Saccharomyces cerevisiae
gtaaatgacgagaaaaaagctgtgcaccagtctgaacatggatgccacaagtactcaggtgtcctatgaagcattaagtatacccaaatttctgatc

SEQ ID NO: 2595 - DNA, 165 bp, Saccharomyces cerevisiae
actttatctccatgactatgccatttctaggtagcctatggtaaacgaatcccgtagattattcacacgtttgttgtctttgttgacaacaacacagagtaagaaaaagcaaaagatttatctcttttgtccatcttttttttattttgaaggcgtgtaacattt

SEQ ID NO: 2596 - DNA, 86 bp, Saccharomyces cerevisiae
atcaaatgatgaaataccaatgcaacagagtcaagctctgagtttcaaaaagaaacatggacgagattgcttttttattactgacc

SEQ ID NO: 2597 - DNA, 74 bp, Saccharomyces cerevisiae; identical to SEQ ID NO: 232

SEQ ID NO: 2598 - DNA, 74 bp, Saccharomyces cerevisiae; identical to SEQ ID NO: 401

SEQ ID NO: 2599 - DNA, 74 bp, Saccharomyces cerevisiae; identical to SEQ ID NO: 401

SEQ ID NO: 2600 - DNA, 1120 bp, Saccharomyces cerevisiae
catccatataaaaaaggagttctgattgatgtctgttatcttagtatctgctggctatgaccacacaataagattttgggaggctcttactggggtttgttcaagaacaattcagcattccgactcacaggttaatcgcttagaaatcaccaacgataaaaagttgttggcaacagcaggccatcaaaacgtacggctttatgacattcggacgacaaatcccaatccagtagcatcctttgagggtcatcggggaaacgttacctccgtttcttttcaacaggacaacagatggatggtgacctctagcgaagatgggaccattaaagtttgggatgtgcgttctccgtccattcctagaaattacaaacataacgcaccagtaaatgaagtcgtaattcatcctaaccaaggcgagttgatatcttgtgatagagatggtaatataagaatttgggacttaggagaaaatcagtgtacccatcaattgacacctgaggacgatacctctctccagtctttatctatggcaagtgatggttcgatgttagcggcagcaaatactaaaggtaattgttacgtatgggaaatgccaaatcatactgacgcatcccatctaaaaccggtaacaaaattcagagcgcactccacatatataactagaattctactatcatctgatgtaaaacatttggcaacatgttcagcggatcacactgctcgtgtgtggtcgattgatgatgattttaagctagaaacgacattggatggccaccaaaggtgggtttgggattgcgcatttagtgctgacagtgcgtatctagtaacggcatcgtccgatcattacgtgagattatgggatttatcaactagagaaattgtcagacagtacggtggacaccacaagggagctgtatgtgtcgcattaaacgatgtatagtttacaatttatcaactaccaagcttgaaggaccgaagtgacaaaaaacattatgattttcagtgtttgcttatccgcctttttgtaaatatagattttactatcctgtgcattttagttaattgattgttcacaaaatgaaagcaatcgcgatgcatatcatcaatgaaaggaagacga

SEQ ID NO: 2601 - DNA, 867 bp, Saccharomyces cerevisiae
taagctggagtgacatagcatttatatatatacaagggaaatggtcaaagctgttatttttaccgatttcgacggtaccgttactttggaagattctaacgattatctgaccgatactttaggtttcggtaaggaaaaaagattaaaggtcttcgaaggcgtgttagatgatactaagtcttttaggcaaggtttcatggaaatgctggaatccatccacacccctttccctgagtgtatcaagatcttagaaaagaaaattcgattggatcctggtttcaaggatacattcgaatgggctcaagaaaatgatgtccctgtcatcgttgtttccagcggaatgaaaccaattatcaaggttttattgaccagattagttggacaagagtctattcacaaaattgacattgtttccaatgaagtggaaatcgatgcacatgatcaatggaaaatcatctataaggatgaaagtcccttcggacatgacaaatccagaagtatcgatgcttataaaaagaaatttgaatctaccttgaaagcaggtgaacaaagacccgtttacttttactgtggtgacggtgtttctgatctaagtgctgcaaaagaatgtgatttgctatttgccaaaagaggtaaagatttggtcacttattgtaaaaaacaaaacgtcccattccatgaattcgataccttcaaagacatcttggctagcatgaaacaagttctggctggtgaaaagacagtcgctgaattgatggaaaattagtgcaagactcttacgaaatattaaagtttaataccgtgtaactgcctcttacatatgtatgcatatatacgtacgtactatatttttcttgtatatctttt

SEQ ID NO: 2602 - DNA, 363 bp, Saccharomyces cerevisiae
tcttaaatatacaaacaaaaaacaaggtccataatgacaaagaatttcatcgtcactttgaaaaagaacactccagatgtggaagctaagaagttcttggattcagttcatcacgcaggtggctctattgtacacgaattcgacatcattaaagggtacaccatcaaggtaccagatgttctccacttgaacaagttgaaggaaaagcacaatgatgtcatcgagaacgtcgaagaagacaaagaagttcatacaaattgattcctgagataaacgcaaacacttttttactcggaaattttctctccccgattgtaaatttatttctcgtctactataataattcaccaaaaaacagcagag

SEQ ID NO: 2603 - DNA, 2010 bp, Saccharomyces cerevisiae
gcatgcctttccttttttctactctgcagttattttcataatatctactgtttccatttcgtgctttaagttagagtttaatcttcccttctatcatcttaatagcaggttcataataagaagattaccacatctactctttgttcgattccaatgtctgaaaataacgaagaacaacatcaacaacaacaacaacagcaacctgttgccgtcgaaactccctcggcagttgaagctccagcatcagcagatccttcttctgaacagagcgtcgctgtcgaaggcaattctgaacaagctgaagacaatcagggtgaaaatgatccttccgtagttcctgctaatgctattaccggtggtagggaaacttccgatagagttttatatgttggtaacctagacaaagctatcaccgaagacattttaaagcaatatttccaagttggcggaccaattgctaacatcaaaatcatgatcgataagaataataagaacgtcaattacgcttttgttgaataccatcaatctcacgatgccaatattgccttacaaacattgaacggcaaacaaattgaaaacaacattgtcaaaatcaactgggccttccaatcccaacagagttcctccgatgatacatttaacttgtttgtcggtgatttgaatgttaatgttgatgacgaaactttaaggaatgccttcaaagacttcccatcctacttgagtggtcatgttatgtgggacatgcaaactggtagttcaagaggttacggttttgtttcctttacttctcaagatgatgcacaaaatgccatggacagcatgcaaggtcaagatttgaatggtagaccgctaagaatcaactgggctgctaagcgtgataacaataacaataataattatcaacagcgtcgtaactacggtaacaacaaccgtggtggtttccgtcaatataacagtaacaacaataacaacatgaatatggggatgaatatgaacatgaatatgaatatgaacaacagcaggggcatgccaccaagttcaatgggaatgccaattggcgccatgccattaccatctcaaggccaaccccaacaatcccagaccattggtttacctcctcaagtaaatcctcaagctgttgaccacatcattagaagtgccccaccaagagttactactgcctatatcggtaatattccgcactttgccactgaagctgatttaattccgttgttccagaacttcggttttattttagatttcaagcactatccagaaaagggctgttgcttcataaagtatgacactcatgaacaggccgctgtttgtattgttgccttggcaaacttcccatttcaaggcagaaacttgagaaccggttggggtaaggaaagatcaaattttatgccacagcagcagcaacagggcggtcagccacttataatgaatgaccaacaacaaccggttatgtctgagcaacaacagcaacagcagcaacagcagcaacaacaataaatattatgaagaaaagtggaatgaaacaaaaagaaagaataaagagaggcaacctacaaatcccaagataaaataaaaaaagaacgacaagaatccattcattatattatactatttttaaaaaaaaaattactacgaaaaagggagagaaaaagaagaagaaactcaatttactattgctcgaaaaataaaagggcctataaacttactctatttttttagtttttctgtgtcttatttccttccttcgtcactgtttaatttttaatactattattttcctttaaaatgtgaaagtcattgctaatagtgtgataaaaataaagaacgtattttctgaaggctttctttattatatttcctttttcctttcttaccctattttttttaaacatccatcccactgtattttgtcgagtccatatatataatttttgtttttattttttacaacttttgttaagtatataaaaatgctacctagcgttatggaga

SEQ ID NO: 2604 - DNA, 1595 bp, Saccharomyces cerevisiae
agtagctcaattcaacatgacctcatcatctggtgttgataatgagatttccttagacagcccgatgccaattttcaatgagagttctactttaaagccaattagggttgcgggtgtagtaacaacagggacagatcatatcgaccctagcgtactacaggcatacttagatgatactattatgaaatccattactttggggcagctagtgaaaaatgcggatgtgttaaataagagattgtgccaacaccacattgccttgaacgccaaacagtcgtttcacttccaaggcaatacatatatctccgatgaaaaagaaacacatgatgtggtgcctttgatggaagttgtttcacaattagatatattacctcctaaaacgtttacagcgaagacagggacaaattttgggaacgataatgatgcagaggcttacttacaatttgaaaaactaatagataaaaaatacttaaagttacctactagagtcaatctcgaaattttgagaggtacaaaaatacactcctcctttctattcaattcttactcttctctttctccccaatcaattctaaacttgaaagtttttagtcaattttataattggaacacaaataaaggattagatattgggcaaagaggagcaagactatctttgaggtacgagccactgttcttacataaactattacacaatccgcattctaatgaaagtcccacgttatttcatgagtggtttttagagacctgctggagatccactaagatatgttcacaaggcactagtgcgccctatatgtattcaggtacaatgttatctcaagcaggcgatcagttaaggacaattttgggtcatacattcgtgctggacaagagagatcatattatgtgccctactaagggttcgatgttgaagtggagtaatgaactttcgcctggaaagcatttaaagacccaattagaattgaacagtgtaaaaagttggatgaatgacgactttattactttttctactaccattaaaacaggatatctaaagaacttatcctcacaacaatccttgcctgtacatatatgtgataagtttcagagtggtgggcccagcgacattcgggggtttcaaacatttgggttaggccccagagatttatatgatgcagtaggtggtgatgcttttgtttcctatggtcttagcgtattttctcgattgccctggaaaaaagttgaaaagtcaaactttaggttacattggttttttaatgggggtaaattggttaatcatgacaatacgtcgttgggtaattgcataggacagctttcaaaggaacactccacatccacaggtattggtcttgtactaaggcacccaatggcaagattcgagctaaactttactttgcctattaccgctcacgaaaatgatttgataagaaaaggattccagtttggtcttggtctggcatttttataagaatacattccttttaatgtcaaggtgaagctatcgcctagcttcccattcaatatttttcatatgttatatagcaacatattctataaaagcctcactaatagctgtgctgcacgtatggtaa

SEQ ID NO: 2605 - DNA, 546 bp, Saccharomyces cerevisiae
ttttcctacatcttgttcaaaagagtagcaaaaacaacaatcaatacaataaaataatgtccggtagaggtaaaggtggtaaaggtctaggaaaaggtggtgccaagcgtcacagaaagattctaagagataacattcaaggtatcactaagccagctatcagaagattagctagaagaggtggtgtcaagcgtatttctggtttgatctacgaagaagtcagagccgtcttgaaatccttcttggaatccgtcatcagggactctgttacttacactgaacacgccaagagaaagactgttacttctttggatgttgtttatgctttgaagagacaaggtagaaccttatatggtttcggtggttaaacaatcggtggttaaacaatcggtgtttgaaattattttcatgcctttcaaaaaataaaataacgatcattctattgggaatataatagaaccttatgtatgcatttttcggttttttattatttcatgtactatatatattaaaaataagtctcaataaaagaaactagtttccgaa

SEQ ID NO: 2606 - DNA, 829 bp, Saccharomyces cerevisiae
caaccacatcaactacagctaagactacaaatttcaattattacacatcagaatgagcgctaccgaatcttcatctatattcacattgagtcacaactcaaacctacaagatatcttggccgccaatgccaaatgggcctcccagatgaacaacatacagccaactttgttcccagatcacaatgcgaagggccagtcccctcacactcttttcatcggctgctccgattcgcgttacaacgaaaactgtttaggtgtcttgcccggcgaagtgttcacttggaaaaatgttgctaacatatgtcactcagaggatttaactttgaaggccactttagagtttgccattatttgtctaaaagttaacaaagttattatttgtggccacactgattgtggtggtataaagacatgtttaactaaccaaagggaagccttaccaaaagttaactgttctcatctgtacaagtacttagacgatattgacaccatgtaccatgaagagtcacaaaatttgatccatttgaaaacgcaacgtgaaaaatctcattacctgtcgcactgtaacgtcaaaaggcagtttaataggattattgaaaaccctactgtgcaaactgctgtacaaaatggagaattacaggtatacggtctgctttacaacgtagaggacggtctactgcaaacagttagcacttacacaaaagttaccccaaaatagttttagcctcaccgatatacttatataatattcattgaaatagaaagacatttacaaagtagacggggatatttagccccactcatataaattatgcattataacttttat

SEQ ID NO: 2607 - DNA, 786 bp, Saccharomyces cerevisiae
aaaaggatgatatgattagtaaagagtatgaatttggtaagactagtatactgaatagaaagaagtatacattagttatcgatgaagacaagaatggcaattttataagatttaccgttttacctgtatctaaccgaaagttcaaaaaagtcaagcaaaatgggagggtagagattaacatgggcatacaatatcaccaaattgtacttattttactactgaatattttgttctatgtaatttgcctaagatcaagatttctcgaacatattaatagaacttttgaagtgacaatcgcgcgaagtttccagatcttaattataatgggattgtttgccttaggtacaattatacttgtgaggggacctagtgtggaaactgtaacaattttcaaagaaagtggactacagctgtccagagtgaagggtatggttatatttcctcaacaatggaatcggaagttctttgaacaagtagagtttatatccaatgaaagaattattgatgtagtgatcaatgaaggattctgtcggggatttcgagtgatattctatcttgcagcaattgtacgtaaatcgtctacgcttaagctattatttccatcaaatttgcccagtatcgatgaccaacgtctaatatacaacatatctagaaaatatctcagtaagcaagaaaaacccctgagcagaccaaaagattgaacatcaaattatcattacagaaaatcttgagacattttggtatatacttatattttagtgtatgtttatatataattatagataa

SEQ ID NO: 2608 - DNA, 1567 bp, Saccharomyces cerevisiae
acacaacagcgtcaaaaattgattaaaaggtaagttatcatgcccacacctatgacgcctgtcaaggtcggcgctttagcctgccagaggaactcatttctcttcgatgggttcaaaacactggttgtttcttgcgaaccaacgaagaataaaaagggagagattgaaggttatgagattgaactacaagatactattctgttccccgaaggtgggggccaaccaagtgattctggttttttgaaaattgttgaagggaatcgtaattcgtcgaaaattgagaagatattagtttcacacgtttctcgtttcggtttacatgcaaagcatcatgtcaatgactacattgagcccggaacaacagtggaagtggccgtggacgagcaaaagagaatggattatatgcaacaacatactggtcaacacttgttaagtgccattctggaacgcaactacaaagtagacactgtatcttggtcgatgggtggtatcatcacaaagaaaaaacctgttctagagcctagcgactatttcaattatatagagttgaacaggaaattgactctcgacgaaataacgaacgtatcagatgagattaatcagttgatcatcaactttcctcaggaaattattgtagaggaaagaatcggtgaagaaacagtagatgaagttagtacatccaaaattccagacgattacgacctctccaaaggtgttctacgtactatccacatcggtgacattgattctaacccatgttgtggtacacatttgaaatgtacctctcaaataggttccattttaattctttccaatcaatcagccgtaagaggttcaaactcaaggctctatttcatgtgtgggaagcgggtttctttgtatgcaaaatctgttaataaaattttactggattctaaaaacttattgagttgttcagaaactcaaatttctgagaagataacaaggcaaaccaaacaaattcaacaattaaataaaagagaacagtattggataaagagattagcacgtaccgcttctgaagaattaatgaacacactgaaagccagtggaaagaaaagggcttattttatggaagaagaatacggaacattggaactgttgctacagatccacaaggaagtatctaattttttgaaagatgatacagaaggttacgaaattatcctatgcggttatgaaagacaaacgaacactggctcactgctaattctttcggaatcgggtgaaaaaattgccaatttggctgctaacttaggttcgatactacaaaacctaaaaggcggtggtggtaagaaaggtggcaagtggcaaggtaaaattacatccatttcgaatgccgagtttgccgccctctctgattatttaagccatgatttcgcatcatgttgagaaatgtgccatttgtatacgcagatttgttgtatacataatggtaggtatttatcgtgatcaagtctcaggaagtcaataagcatggtctattcttttcttttatgtagtttataataggcaactttaatgttcccagaagacgcgttttccatta

SEQ ID NO: 2609 - DNA, 752 bp, Saccharomyces cerevisiae
actgagtttggaactatcagccgtcaaatacgcataaaataacatcaaatactccaataatgaatcagttaggagctttagcccaagtttcacgtttcactcaaaacttctccatggaaaatattaagagcgagttccaatccttgcaatctaaattagcaacccttcgcaccccgcaagaatttttcaatttcaagaaaatttccaaacctcaaaactttggggaagttcaatccagagtggcgtataacctgaagtacttttccagtaactatggtttgattattggttgtttgagcatttacacattattaacaaacttgttgctactctttgttattgttctagtcgtagctggtattgttggtataaacaaactaaagggtgaggagctcgtaactccatttggttctttcaagaccaaccaactatacaccggactggtttgtgttgctgtgccaataggtttcttagcttcgccaatctcaactttgctatggttgatcggtgcttctgccgtcagcgttttcggacatgcatcattgatggaaaaacccatcgaaactgtatttgatgaagaaactgtttgaacactcctacaagtgttgggaaaaggagtcattcttttctattgtgtattttactcttcttcaatatttagttaattcttgtcttttattctctttctccgtcaacattagtatttaattgtatacagacaccattcataattgcagttagcttctctgttc

SEQ ID NO: 2610 - DNA, 2084 bp, Saccharomyces cerevisiae
atgttcttgcttccatttgtcattcgtcattccagctctatttacctgcccacgcttcgatttcgaggtttacttactgtaatctcaagaaacatacacatttccacccctcataaaatgttgcctctttcaattgagcagagaagaccttcccgctcccccgaatacgatcagtctactttatcaaattataaggacttcgcagttcttcacaccgatttaaacctgtctgtttccttcgaaaagtcagccatttcagggagcgttacattccaattgaaaaaactgcacgaaggtaaaaataaatcggatgaattacatctggatacatcctatttggatgtccaggaggttcatattgatggttccaaggcagattttcaaattgagcaaagaaaggagccattgggctccaggttagtcatcaataacgcttcttgcaacgataactttaccttgaatattcaatttcgtacgactgacaagtgcaccgctttgcaatggttgaacagcaagcaaaccaagggcggtaaaccgtacgtgttttcacagttggaagctattcatgcgaggtctttgttcccctgctttgatactccctctgtgaagtctactttcactgcatctatcgagtccccactaccagtggttttttcaggcatcaggattgaagatacaagcaaggatactaatatttacagatttgaacagaaagtccctatcccagcctacctgatcggtattgcttccggtgatttgtcaagcgctccaattggacctcgttccacagtttacactgaaccatttcgtttgaaagattgtcaatgggaatttgaaaacgatgtagagaaattcattcaaactgcagagaaaattatctttgaatacgagtggggcacttatgatatcttagttaacgtcgattcgtacccttacggcggtatggagtctccgaatatgacttttgctacgcccaccttgattgcacatgacagatccaacattgatgtcatcgcccatgaacttgctcactcatggtctggtaacttagtgaccaattgttcgtggaatcatttttggttgaatgaaggttggaccgtttacttagaaagaagaattattggtgccattcatggcgaaccaactagacatttcagtgctctgattggttggagcgatttgcagaattctattgattctatgaaagatcctgaaagattttccactttggtacaaaacttgaacgataacactgaccctgacgatgccttttccactgttccgtacgaaaaggggttcaacttactatttcacttggaaactattttgggtggtaaggctgaatttgatccatttattagacactatttcaagaagtttgccaaaaaatcattggatactttccagtttttggatactttgtatgagttctatcccgaaaagaaagaaattttggattccgttgactgggaaacttggctgtataaaccaggtatgccaccaaggcctcattttattacggctttggctgataatgtttatcaattggctgacaagtgggtcgaaatggctcaacatttgaaaaccacagaggatttccggtctgaatttaacgctattgacattaaggattttaattcaaatcaattggttttgttcttggaaactttgacacaaaatggccattccaacaagaaaccaaaagattttgactgggccaagtttcccgtggcatctagggcactgttagatatctatcaagataacattgttaaatcacagaacgcggaagttgttttcaagatgttcaaatttcagatctttgccaagctgcaagaagaatataagcatttggccgattggttgggaactgtaggtagaatgaagtttgtccgtcccggttacagactattaaactctgtagaccgtcgattggcacttgcaactttcgacaaattcaaggacacgtatcatccaatctgtaaagctcttgtgaaacaagatttaggtctttgaaaagggacgtgtcgtaacatgaatacgtaaacaattaaatataacctactaatgagccttcattgcta

SEQ ID NO: 2611 - DNA, 767 bp, Saccharomyces cerevisiae
tcgaacaagaaactgcctgccatttgaattattcatatataaatacactaatcatacgtgagcatagtgtgacaatttcggcgcaagatattaatggagcacgtatcaaagaggtcaattgggcaattctttaagaggaaaacttcaactgtagatggaagcaaatcacagaaatgcggaaccactaaccaactgcggaagctgctgcataaaagaagggtacagaagcaggcagtgccggttgaatcccagtacagaattccgggtgattttagggataatcaaagcgtgagagtcaaaaactctatgtacaacagctcaccgtcagtaacgccatctacgcatcatatcaatgaaaggtatgttcgctatgacatcaacacaaggcctttggttgttgtgctcgcgatctcaattgtattttttggctgtctcctggtcctcaaggacatcatcatccagtcatcagaaaacatcctgagtgtttccaaatggaaaatcataggggcctccttcatgggtacgccctacacaggtcttctcacggggctcgttggccctctcctgtcaccattttcggctgtttcgtcgtggctttcattcatcttttgacacaatgcgtcttcagtttccgggggcattgcgtatggaaaatcatgtcactttttttcttccactttttcgtttgacttatataaacgcactttagtatagtttgctttatgtattaggttatcttggtgttctaattgatgttcttgcttcca

SEQ ID NO: 2612 - DNA, 1757 bp, Saccharomyces cerevisiae
caggcgaaaatgggcagtgcttggacaaactacaattttgaagaggttaagtctcattttgggttcaaaaaatatgttgtatcatctttagtactagtgtatggactaattaaggttctcacgtggatcttccgtcaatgggtgtattccagcttgaatccgttctccaaaaaatcttcattactgaacagagcagttgcctcctgtggtgagaagaatgtgaaagtttttggtttttttcatccgtattgtaatgctggtggtggtggggaaaaagtgctctggaaagctgtagatatcactttgagaaaagatgctaagaacgttattgtcatttattcaggggattttgtgaatggagagaatgttactccggagaatattctaaataatgtgaaagcgaagttcgattacgacttggattcggatagaatatttttcatttcattgaagctaagatacttggtggattcttcaacatggaagcatttcacgttgattggacaagcaattggatcaatgattctcgcatttgaatccattattcagtgtccacctgatatatggattgatacaatggggtaccctttcagctatcctattattgctaggtttttgaggagaattcctatcgtcacatatacgcattatccgataatgtcaaaagacatgttaaataagctgttcaaaatgcccaagaagggtatcaaagtttacggtaaaatattatactggaaagtttttatgttaatttatcaatccattggttctaaaattgatattgtaatcacaaactcaacatggacaaataaccacataaagcaaatttggcaatccaatacgtgtaaaattatatatcctccatgctctactgagaaattagtagattggaagcaaaagtttggtactgcaaagggtgagagattaaatcaagcaattgtgttggcacaatttcgtcctgagaaacgtcataagttaatcattgagtcctttgcaactttcttgaaaaatttaccggattctgtatcgccaattaaattgataatggcggggtccactagatccaagcaagatgaaaattatgttaaaagtttacaagactggtcagaaaatgtattaaaaattcctaaacatttgatatcattcgaaaaaaatctgcccttcgataagattgaaatattactaaacaaatctactttcggtgttaatgccatgtggaatgagcactttggaattgcagttgtagagtatatggcttccggtttgatccccatagttcatgcctcggcgggcccattgttagatatagttactccatgggatgccaacgggaatatcggaaaagctccaccacaatgggagttacaaaagaaatattttgcaaaactcgaagatgatggtgaaactactggatttttctttaaagagccgagtgatcctgattataacacaaccaaagatcctctgagataccctaatttgtccgaccttttcttacaaattacgaaactggactatgactgcctaagggtgatgggcgcaagaaaccagcagtattcattgtataaattctctgatttgaagtttgataaagattgggaaaactttgtactgaatcctatttgtaaattattagaagaggaggaaaggggctgatgttttttgaaaatagaagccttgtttatgagaaaacttatacataatattacatacaaactagagcattactatataattaacttacttgtcacagctga

SEQ ID NO: 2613 - DNA, 754 bp, Saccharomyces cerevisiae
gcaccaaacacaagatcaactaagaacgcatctacaatgttacgtaacacttttactagagctggtggactatcacgtattacatccgtaagattcgctcaaacacatgctctttccaacgctgctgtaatggatctgcaatccagatgggagaacatgccctccactgagcagcaggatattgtcagtaagttgagtgaacgtcaaaaattaccatgggcacagcttactgagcctgaaaagcaagctgtgtggtacatttcttacggagaatggggcccaagaagacctgtattgaataagggtgattccagttttattgccaaaggtgttgctgcaggcctactattttcagtgggactttttgctgtcgtcaggatggcgggtggccaagacgcaaagaccatgaataaggagtggcagctaaagagtgacgaatatttgaagtcgaagaatgctaatccttggggtggttattctcaggtccaatctaaatgaacaggccagaaattttgaaaggaaatcaataggggttaacgattgtcatggttttttcagctagtctgtgacctgtacgaaagtgaatatcttattacattataagtgtatccatgggcatccgcccaatacaatgccaacatatcaaacataaaattggctgattgccactctcacattttttctttatttatttactcaaattttgtaattttttgttagacatataattttatatcattattcttattattct

SEQ ID NO: 2614 - DNA, 1926 bp, Saccharomyces cerevisiae
ctgggtatttttctttttatagcgcaggagcggaaggcaatttccaaaacaggaatgtactttccaaaaaaggaaaatgtagtttgttttttgatgtttttttctctttgactatttcaaatttagaagtgaaaaaatacaaaaatgttacataggattcgatacagtgtaatatatcattattattacttttaaataaagcgtttagtaaacaagagtgagggttatgcaactcgtttagtaaacattcttttttttttcttcatttaagtataagacaacaatagtagcggaagcgatagtaatacatttggtagcgataagtgcacatgcaatttcactcagataagcagcatttggacagtaaaaccgacatcgatttcaagccaaactcaccgcgttccttacaaaataggaataccaaaaatttatctttagatatagcagcactccatccattaatggaattctcatcgccaagccaagatgtgccaggttcagtaaaattcccatcgccgacacctttgaatctatttatgaagcccaaacctattgtgttggagaaatgtccaccaaaagtaagtccaaggccaacgccaccatcgctgtcgatgaggcgaagcgaggcctctatatacacactaccaacatctttgaagaaccgaactgtttctccaagcgtgtatacaaaatcatccacagtatcgtctatcagtaagctgtcatcatcatcaccgttatcgtcattttcagaaaaacctcatctgaatagagtccattcattatccgtgaaaactaaagacttgaagttgaagggaattagaggacgttctcaaacgatctcagggttagagacatccacgccaatttctagtactcgtgaaggtactttagatagtacggatgtcaacagattttctaaccaaaagaatatgcaaacaacattgattttcccggaggaggactcggatctgaatattgatatggtgcatgcagagatttatcaacgaacggtttatttagatggaccattgctggtactgccgcctaatttgtatctatattcagaacccaaactagaagatatattatcgtttgatttagtcattaatgttgccaaagaaataccgaacctggagtttttaataccgccggaaatggcacataaaataaaatattaccatattgaatggacacacacatccaagatcgtcaaggacttatcccgattgacacgcattatacataccgctcattcgcaaggcaagaaaatactcgtacactgtcagtgtggagtatcaagatcggcgtcattgattgtggcgtatatcatgcgatattatggcttgagtttaaatgatgcatacaataagctgaaaggtgttgctaaggatataagtccaaacatgggtctcatcttccaacttatggaatggggaaccatgttgtccaagaactcaccgggcgaagaaggagagactgttcacatgcctgaggaagatgacatcggaaacaacgaagtttcctcgactacgaagtcctactcttctgcgtcctttagaagttttcccatggtaacgaatctatcatcgtcgccgaatgacagttctgtcaattcttcggaagtaacgccaagaactcctgctacgttgactggagcaaggaccgcactggccacagaacgcggggaagatgatgagcactgtaaaagtttgtctcaacccgcagattcactggaagcttctgtggacaacgaatcaatatctactgccccggaacagatgatgtttcttccttaagggacagcatctcccaaaagaatctttatgactatcagatctgcaggcagaccgcctccctacgcttctaaatagaatgtacttagcacttctgcctacatagtaattattcatcattgtaagtgtc

SEQ ID NO: 2615 - DNA, 750 bp, Saccharomyces cerevisiae
cttaagatattaaagtctagttgatatatcaacaagtgaaggcaaaataccaatagagtgcacgtttcttgatgctatgaaatacatacccccattaaatttttcgccagtggtgagcacggatgtatcgttatatcgatcgggatacccgatgccgttaaattatagtttcatcaagcatcagttacacttgaagaccataatatatattggcgataaagataggcctctcgaagaatatcaaagcttcctggagtcagaaaagataaaatactatcacatatttatggattcaagccgcgatgaaggaattcaagaaagaatgaaccaggtcttgcacttggtgctggatgtcagaaactatcccatcttagtgcattccaataagggcaagcaccgtgttggtgtagttgtgggaatcataagaaagttgttacagggatggtccactgcaggtatatgccaagagtacgggttattttctggtgggatgaaagatggagtagatttggagtttatcacaatgttcgaaaccaatctgaaaataccgagaaacgttatccctggctttgctaaacactgcttgtatttgaatgagctagaggctgcggaaggaagtgatgatgagtcaggaagtgagtctattctcactgccaagcaaccaatatgattatgagaaccagccgttacaaagaatattttctgtcattaatatatttgtataaataaaacaacaagtctaaagatcaa

SEQ ID NO: 2616 - DNA, 2036 bp, Saccharomyces cerevisiae
tgtgttggctaatattagaattacatatacatataataggaaatgggtagtagacgtcataagaacaagcaagccgccccaccaaccctggaggagtttcaggcaagaaaggaaaagaaggctaatagaaagctagaaaaaggaaagagaccttctaccacgcaaggggatgaagtttctgatagaaagaaaaagaagtcgaagccattcaagaaatctagaaaagaggaggaagaagttgttgaagaggataaggatttgccagaagttgatcttgaagaattatcaaaagccaggaaatctttatttgatgatgaagaagatgacgatgaagcaggattggtggatgaagaactaaaagatgaatttgacttggaacaagaatatgattacgatgaagatgaagataatgacgcccacccaattttttcagatgacgacgatgaggctgatcttgaagaactaaatgcacaaaacatggaagctctttctaagaaacttgatgaagaagaagctgaagaagctgaagaagccgaaatggagttagtggaagcggagaacatgcaaccaagagcagacatattgcccactgaggagcaggaagaaatgatggcacaagaaactcctaatttaacttccacaagaacaagaatgattgaaattgtaaaggttttggaaaattttaagactcttggtgcagaaggcagatcgagaggagaatacgttgacagacttttgaaagatatttgtgagtactttggttatacaccatttttggcggaaaagttattcaatctattctcaccagcagaggcgatggagtttttcgaagccaatgaaattgcaagaccaataaccatcagaaccaacaccttgaagaccagaaggagagacttagctcaaactcttgtgaatagaggtgttaatctacaacctattggttcttggactaaagttggtcttcaaatattcgattcccaagtcccaattggtgctacgccagaatatttggcaggtcactatattttacaagcggcatcatcttttctaccagttattgctctagatcctcatgaaaatgagcgtatcttggatatggcagctgctccaggtggtaagaccacttatatatcagctatgatgaaaaacacaggttgtgttttcgctaacgacgccaataaatctagaacaaaatctttaattgctaatatccaccgtctaggctgtaccaacactattgtatgcaattacgatgcccgtgagttccctaaggtaattggaggttttgacagaattttactggatgccccatgttccggtactggtgttatcggtaaggatcaatctgtcaaggtgtctcgtaccgagaaggacttcattcaaattccacatctacaaaaacaattgcttctatccgccattgattctgttgattgcaactcgaaacatggtggtgtaatagtatattcgacatgttctgttgcagtggaagaggacgaagctgtcatagactatgcattgagaaaaagaccgaatgtcaagttagtcgatactggtttagcgatcggtaaagaagcgtttactagttacagaggcaaaaagtttcatcctagtgtgaaattagcgaggaggtactatccacatacgtacaacgtcgatgggttctttgtcgctaaattccaaaagatcggtccatcttcgtttgatgataaccaagcaagtgcaaaagaaaaggaaactgctgctagaaaggaagctttggaagaaggtatcattcactctgacttcgcaaccttcgaggacgaagaagacgataagtacattgaaaagtctgtgaaaaacaatcttttgaaaaagggtgtcaatccaaaagctaaaagaccttctaacgaaaaataagttcccacaaacgtagtggcatcatgttagcatagttttctctctctaatctttctctgtctacatatatatatatatatatatatatcaatttcaaatatgtctcactgtatattaaattcaaaatagaaataata

SEQ ID NO: 2617 - DNA, 1187 bp, Saccharomyces cerevisiae
aaacgactttattttgccgactctctacggtcaatgtcttgttacgttttcaagtgcttttagaaactctgcactctcttccccttaactcgtagacaaggagcgatagttgaatggtaggaacgaaaaagaaacggttagaaagaacatatgcctcgaatatctacatcattgataagaaaagcttcgagaatacgacctggtttgcatcttttgcttccagaatgtaggactctcgagcaagcgaaactcgagtacaaatggctcaccgaagagctgcctccggataaatcaatccgctgggcttgcttacagagatacaaacacgtcccattgcagtacatcttaagatcgcaaccgtttggggccttggacatagtttgcaagcctggtgttcttataccaagatgggaaaccgaggaatgggtgatggccataataagagctctaaacaactctatgctttcaaggcatactataccactgcatatttgtgatacgtttacaggaacagggtgtattgctctcgctttgagtcatggtatagcaaattgcacgttcactgccattgacgtgtcaacaagagcaattaagttggttaaagaaaatatgctgaaaaacaaggtgagtggtggtaagctcgtgcaacataatatattgtcctcaaaagctagcgatgaatatccatcccatatagatatattaaccggtaaccccccctacattcgaaagcgtgacttcaatagagatgttaaaacttccgtaaagctgttcgaaccaaggctagcgctagtgggtgagcttgaatgctatataaatctagtaaattattggctgccgaagacagactccttcttttatgagattggagacgttgaacagtttaattacgtggagaggcgcattaaagaagattcatatctcagccgtatttggtctattggtttgaaatatgactcgaatgggaaagcaagagtcgtatatgggtttaaggccactcccaaagggcgaatactacaccagatttttgcatcctttgggactataagacatttagcaaccgcactcagtgggcacaaagctaattgcaactaagtatataaatgtaaatatatatattctcaggtttttttgttggaagttatcaaacggaacactctgtggacatttatattttttgtttctta

SEQ ID NO: 2618 - DNA, 1819 bp, Saccharomyces cerevisiae
cgtatgtttaatttaatgataagacctttcatgttactatattttgagtttgcaaattattccactgattacgaaattgctgtgcttttttcgcttcggtgcatcgtcatttttcgagaataaagcaaatttttacatgcccgttatttttccgtgcacaacttctttttggcttttttggccgtcggatttacggcgcgaaaataagtttctgacttctcgagatatagccattgtagaaactaaaacaatattgattgattcaattagcactaatcttagaaaatttgcaatcctactcttttcgcaatgattttatttactaacccatcccaaatttattttagtaatttgataaaatgaaactgtccgccaccactcttaccgcggcttcattgatcggttatagcacaatcgtttccgctttgccgtatgcggctgatattgacacaggatgtactactactgctcatggttcacaccagcataagagggccgttgcagttacatacgtttacgaaacagtcactgtcgataaaaatggtcagaccgtcactccaacctcaactgaagcctcttctacagttgcttccactactactctgatttccgaatcttcggtcaccaagtcttcttccaaagttgcttcttcttctgagagtactgaacaaatcgctaccacctcgtcttcggctcaaacaactctgacatcttcagaaacttctactagcgaatcctctgtgcctatttccacatctgggtcagcttccacatcttcagcagcttccagtgcaactggaagtatctacggtgatttggctgacttttcaggtccatatgaaaaatttgaagacggtaccattccttgcggccaatttccatctggtcaaggtgttatccccatcagctggttagatgaaggtggctggtctggtgttgaaaatactgacacttctacgggtggctcttgtaaagaagggtcttactgctcatacgcttgccaaccaggtatgtccaagacacaatggccttctgaccaaccatctgacggcagatccattggtggtttgctatgtaaggacggctacctgtaccgttcaaatacagatactgactatttatgcgaatggggcgttgatgccgcttacgtcgtctctgaattgagcaacgatgttgctatctgcaggaccgattacccgggtaccgaaaacatggtgattcctacatatgtgcaagcaggtgactctttacccttgactgtcgttgatcaggacacctactacacttggcaaggattgaagacatccgcgcaatactacgttaacaatgccggtatttctgtcgaagatgcttgtgtttggggttcttcaagttcaggcgtcggtaattgggctccattgaactttggcgctggttcttctgatggtgtcgcctacctttctttgattcccaacccaaacaacggtaacgcattgaatttcaatgtcaaaattgtcgccgctgatgactcttctacagtcaacggtgaatgtatctatgaaaacggtagcttcagcggtggctctgacggttgtaccgtttccgttactgctggcaaagctaagtttgttctatacaactaaacttaggcgcatcaacagttgagtaagttgattgtattattaccccattcttttctgcccgtccattttattgtctgtttaacatacactaaaacccacgccggattaatatcaatttttttttactttgtttctatttatcattcttccagacataaattattttgtaatattaaagacatttgaaaacctacata

SEQ ID NO: 2619 - DNA, 777 bp, Saccharomyces cerevisiae
ctagcctccaatagtcactaaagatgaagtacattcaaaccgaacaacaaattgaaatcccagaaggtgttactgtcagcattaagtccagaatcgtcaaggttgtcggtccaagaggtactttgaccaagaacttgaagcatattgatgttaccttcaccaaggtcaacaaccaattgatcaaggttgctgttcacaacggtgacagaaagcacgttgccgctttgagaaccgttaaatctttggttgacaacatgatcactggtgtcaccaagggttacaagtacaagatgagatacgtctacgcgcatttcccaatcaacgtcaacattgttgaaaaggatggtgctaaattcattgaagtcagaaactttttgggtgacaagaagatcagaaacgtcccagttagagatggtgttactatcgaattctctactaacgtaaaggacgaaatcgtcttatctggtaactctgttgaagacgtttcccaaaatgccgctgacttgcaacaaatctgtcgtgttagaaacaaggatatccgtaagtttttggatggtatctacgtttcccacaagggtttcattgtcgaagacatgtaaatggaacaaaaaagtgtctttgcgcttagaggcgcttaaatatgtacattattcctacttttttatttagtattatgtaaagactgaggttctttgtcattggatgtgcctcacttccaatgatgaattgacaggctctctagggaatgctgtcaaggggaaacgttgctagtgctca

SEQ ID NO: 2620 - DNA, 382 bp, Saccharomyces cerevisiae
gaaagaaactagttccctcttatctctcaatatttgccaaaattagcttttaacaaataaaccatgagtttcctaccatcttttatcttaagcgatgaatctaaagaacgtatttccaaaattttaactttgactcataatgtagcacattatggctggatcccatttgttttgtatttgggctgggcacacacttctaatagaccaaactttttgaacttactgtctccgttaccaagtgtttaaaaacatcagttcgatacaacttgggtgagagaggaagcccatatttccaattttgaattacttgaccgttactgcaaataataaaaattgacatgtacataaagtatatatataataaaatataaaattcattttg

SEQ ID NO: 2621 - DNA, 1639 bp, Saccharomyces cerevisiae
gcatccagtaaaattaatagttattagcgtactatgtctgcctttgtcagggtggttccaagaatatccagaagttcagtactcaccagatcattgagactgcaattgagatgctacgcatcgtacccagagcacaccattattggtatgccggcactgtctcctacgatgacgcaaggtaatcttgctgcttggactaagaaggaaggtgaccaattgtctcccggtgaagttattgccgaaatagaaacagacaaggctcaaatggactttgagttccaagaagatggttacttagccaagattctagttcctgaaggtacaaaggacattcctgtcaacaagcctattgccgtctatgtggaggacaaagctgatgtgccagcttttaaggactttaagctggaggattcaggttctgattcaaagaccagtacgaaggctcagcctgccgaaccacaggcagaaaagaaacaagaagcgccagctgaagagaccaagacttctgcacctgaagctaagaaatctgacgttgctgctcctcaaggtaggatttttgcctctccacttgccaagactatcgccttggaaaagggtatttctttgaaggatgttcacggcactggaccccgcggtagaattaccaaggctgacattgagtcatatctagaaaagtcgtctaagcagtcttctcaaaccagtggtgctgccgccgccactcctgccgccgctacctcaagcactactgctggctctgctccatcgccttcttctacagcatcatatgaggatgttccaatttcaaccatgagaagcatcattggagaacgtttattgcaatctactcaaggcattccatcatacatcgtttcctccaagatatccatctccaaacttttgaaattgagacagtccttgaacgctacagcaaacgacaagtacaaactgtccattaatgacctattagtaaaagccatcactgttgcggctaagagggtgccagatgccaatgcctactggttacctaatgagaacgttatccgtaaattcaagaatgtcgatgtctcagtcgctgttgccacaccaacaggattattgacaccaattgtcaagaattgtgaggccaagggcttgtcgcaaatctctaacgaaatcaaggaactagtcaagcgtgccagaataaacaaattggcaccagaggaattccaaggtgggaccatttgcatatccaatatgggcatgaataatgctgttaacatgtttacttcgattatcaacccaccacagtctacaatcttggccatcgctactgttgaaagggtcgctgtggaagacgccgctgctgagaacggattctcctttgataaccaggttaccataacagggacctttgatcatagaaccattgatggcgccaaaggtgcagaattcatgaaggaattgaaaactgttattgaaaatcctttggaaatgctattgtgaggttagaatgaaaataaaattcgccagtaaatgcgtatcttggagaaaatatcaatttgttattttgtatatataaaaaattaaaaaaaaaaaaaaaaaaatactcaaatactcaaatacgtatacattatactgaaatacttcgcttgtcttcgaa

SEQ ID NO: 2622 - DNA, 1015 bp, Saccharomyces cerevisiae
cacaccaaattgatacgattaaatggtaccccccacggtagaagcatccttggagtctccttacactaagtcgtacttttcacctgtcccaagcgcgctcttggaacagaatgactctccaataataatgggtatcgatgaagctggcagagggcccgtattagggccaatggtctacgcagtagcctattctacacagaaatatcaggacgaaactataatccctaactacgagtttgacgactctaaaaaacttacagatcccatcagaagaatgctgttttccaagatataccaggacaacgaagaactaacccagatcggctacgcaactacgtgcatcactccgttggatatctctagaggaatgagcaagttcccaccgacgagaaactataacttgaatgagcaggcgcacgatgtcacaatggcactcattgatggcgtgataaagcagaacgtgaagctcagtcacgtgtatgtggatactgttggaccaccagcgtcctatcagaagaaactggagcaacgatttcctggtgtcaagtttacggtcgccaagaaggcagactcgctctactgcatggtcagtgtggcgagtgtcgttgcaaaagtgaccagagatatactagtcgaatccttgaagagggatcccgatgagatcctgggttctggatacccctccgacccgaagacagtcgcatggctgaagcgcaaccagacaagtcttatgggctggcccgccaacatggtaagattctcatggcagacatgccagactctgttagatgacgccagtaagaatagtatccctatcaagtgggaagaacaatatatggacagcaggaagaacgccgcacaaaaaaccaagcaattgcagctccagatggtcgctaagcctgttagaaggaagaggctgagaaccctagataattggtaccggtgatcacctccagtttgcacatactatatatcttcatgtaatactacatatgtcataacttcaataactcat

SEQ ID NO: 2623 - DNA, 1810 bp, Saccharomyces cerevisiae
gatgaatgtgctgttaaaaagacgcagtttaacgtttgcaccgagatggctgtggtgcaagtgtcgaagtagcaggagcaggccgtattctctggcacacgcggtcgacacaagtaagatggaggcaaccaggaggaacggtcagattgtgaaggacctgggtagatactatccgtcaatgtcagaatcagcactccacgatctttgccaggagtataaagaagtcactatcgcagactttaatgagagattcttgggcaacccagccacattacaccatgaggataatcctaatttgttacttagtattaatggcaggattaaaagcattaggttttcaggccagaagattgtttttatagatctttacaacggcagtagcggattgaagaatgatacgcaactgcagttgatcgtaaactacaataaaattggtgggagtagtgaggataaggcgaatttctcagaatatatgaactttttgaagaaaggagattatattaaggcgctcggttatcccgggttttcccaatccagagtcaagatgctgtccttgatatgtaataagctacctatagtattgtctgtttcgcaactgccgttaccttccagactgaatgatgaaaccaagatcaaatctaatagagttgttgactaccaattaaacggcactcagacactgctagtaagggcgcgtatcatcaaacttttgaggaagtttctcgacgacagaaacttcgttgaggttgaaacgcctatactgtcatcaaagtccaacggtgccatggcgaagccctttataacgtcgtccaaggacttcgaccatttggagttgcgtattgcaccagaattatggctgaagaggcttataattagtggtttacaaaaagtatacgaaataggaaaggtctttcgaaacgaaggcattgattccacgcataatgctgagttttccactttagaattctatgaaacttacatgtcaatggacgatatagtcacaaggactgaagatttgttcaaatttttgattactaacttgcaaaagttctttcaagatacccgtctgcctgtccctaagacgtttagtgaattacatctggcactatccgagaataattggaagtttagaaaagtcgaattcctgcccactttgaacaaagagcttggcattgatctaatgaactctggattggatatcaataagccgagcgaacttttgaaggctttaccgaaagacattgcgaagaagtattttccttctgcagataacactgggcaattatcttcgctgcaaatcctaaataaactatcggacgtgttcctcgagcagcgccattgtcaatcaaccttgcctacggtaatataccatcaacctgcaatattatcgcccttagccaagacggatccgcaaaataagcaagtcacgaagagattcgaagtcttcatcaaaggtaaggaatacatcaatgcttacgaagaggaaaattgcccccaattacaactgcagaagtttctacaacaaaagcagattaacgaattgacaggaaacaaaactgagaccttatcgcctgttattgactaccagtatgttgagacgatgaaatacggtatgcctccagtaggtggctttggccttggcatagatagattgtgcatgctattttgcgacaagaagaggatagaagaggttctgccctttggctgtgtggatgatgtaaacaggcagtaaattttgcgacgcctgccaatgcttttgtaaataaatcagacatatactgtaaataattagaatggcatttaatttttt

SEQ ID NO: 2624 - DNA, 1166 bp, Saccharomyces cerevisiae
ttggacttgaaagggcatatatactcggttttatcattgattcaagtgttcccataaataataaaacagttaaatcgaaatgctaagaagacaagcccgtgaaaggagagaatatctatacagaaaagcgcaagaattacaagattctcaactgcaacaaaaacgtcaaataattaaacaagcgctagctcaggggaagccattgccaaaggaactagcagaagatgagagtttacaaaaggatttcagatatgaccaaagtttaaaggagagcgaagaagcagatgatctacaggttgatgatgaatatgctgccacaagtggtataatggatccaagaatcatcgtcacaacatctcgtgacccaagcactcgtctctcgcaatttgccaaagaaattaaactgctatttccaaatgctgtcaggctgaacagaggtaattatgtgatgccaaatctagtggatgcttgtaaaaaatccggtactacagatttggtggtattacatgaacatagaggtgttccaacttctttgaccatatcacattttccacatggacccactgcacagtttagtttacacaatgttgttatgagacatgatattataaatgctggtaaccaaagcgaagtgaatccacatctaatatttgataactttactaccgctttagggaaaagagtagtctgtattttaaagcacttgttcaatgcggggcccaaaaaagattccgaaagagtaatcacttttgcgaataggggtgatttcattagcgttagacagcatgtatatgtgagaacaagagagggagtagagattgccgaagttggtcctagatttgagatgaggttgtttgaactgaggttgggaactttagaaaataaggacgctgatgttgagtggcagttgagaagattcataaggactgccaataaaaaagactatttgtgaatttttttatagatttgtaaaggttaaaatagaaggccgatgaggccttatgtaagtctaatatggtattcttaaaaaaaaaaaaaaaaaaaaagcgtcttagagggaatataagagaaaagaagagatagcataacacatgatttatttttatttttgcgttttttttttttcttaattgtttatcaatgtatctgtgagagtatctacataa

SEQ ID NO: 2625 - DNA, 1402 bp, Saccharomyces cerevisiae
tttcttgcagatacgtcttgaaatacaaccatacagacaatggagacatacgagactagcattgggactcagtcttatcccccgactttgttcccacctcccctgggtaccggtgggtttaccacttcaggttatatacatgcgcttgtggattctacatcgaactcgaactcgaactcgaacacaaattcgaacacaaattcgaacacaaattcaaattcagataccaagattcctatagtgcaaatatcggatgactctcatataacacacgacagcttcaaaccatatatggagtaccacgatgcttcgcacttgaggaaccgtaacataagcaaagcggaccaggttgaaagcactgaagtgatggaacagtttacgcaatggtcgaattataagatgaggtctcgctctcctaccataaacgcaaagccaattcgacacacttcacaacgaagaacagactttaccagcaaaaatgaactctccaagttcagcaagaatcataatttcatttttcacaaagggtttttgaagaggcaacactccatacgcagggaagacaggcaagcaaaggtacggtcaagattcaggagcaagaaggagctgacatccgttttgaactatatagaactggaacaaatggatattgcaaatgtcctggcttcgcaaccggtaaacttacacgctatcagaaatctcactagcagggaccctgcggtaactcctatcccatttttaagaagccagatgtatgcaaccagtagtcgtccaccgtatctaaggaaccgctccataagtaggaaactacccaaatcacaaccaggtagtctcccgacgactatgcctgcgacggcgacgaaaacaattaaacagaattcaacgaccccaaccacaagatctgtttataacaagaatgtggggcggtccaatacttcccctagtgtgttgtaccacccaaaaagaagaggaaaattgaacaccaaatcgcatgcaagaaaggagcaactgctgttggaactgtggagagaatacttaatgctggttataacacagaggacgcaactgcgcctgactttgctttgctctccgggttcagcatcgaatgaaagctctgtctgctcttctaacgccagcgacttagacatgtcccttttatctactccttcaagtctcttccagatggcaggtgagaccaaaagcaatcctataattatacccgacagtcaagacgatagtatacttagtagcgaccccttttaagtaggtaaccccccctggattgcatagccattgcatagccttagacatcaaactttatttaatcacattatccttctatgtatctttttcccccgctcgatttcttctagaacattacggaaaataaaggaaaaaaatg

SEQ ID NO: 2626 - DNA, 3018 bp, Saccharomyces cerevisiae
gaaataactgtctcgcttatatctggtctattttttgttttttgcctttccttttaaattctttataaccttgaaaacaaaaaatcacattggtaaattacaatcatttattaccaaatttgtccattaactattttagcgtgactgactgataaagactgtttcactctctttatttattcataacaaaaattcagatattttgaactataaagtactaaaggcagaaaaattaatagcaaattaagcgatggcaatcaagtcattggaatcgttccttttcgaaagaggtctagtaggatcctatgccattgaggctctgaataattgtaccctggatatagacgtcaaccattatgtttccagattgttgaccaataaaagagaacagtatttggatgccattggtggtttccctaccagtttaaaaatgtatttggaaagcgacttaaagatattcaaggatttcaatattacccctatttttgtctttaatggtggtttgacttacaaccaattagaggcatcgggccattttactgcagcatctgcttctgcgtcgatttcgtcaaccactacttccagcagcggtaccaatgccacaacaagatccaacacggaatccgttcttttgcagagaagtagaggctggacacaatggaacaacttgattagttcgaatcagaattcctatattgaccagcctattcaaccccaagagccattcagacataacaccacaattgactccaaagcttaccaaaacgatttgatcgcttattttattgagcatgggtatatgtaccaagtggctccttactcctcttggtttcaactagcatatttattgaatagcgcttatattgatgcgatctacggcccaactgattgtttgatgctagattgtgttgataggttcattttgggtatggaatttccaaataaagaatttcgattcattgacaggtcaagagtgatgaaggatttaggttgtacccatgaagagtttatcgatattgctatggctgtaggtaatgatttgcaaccaacaactttaccaccattgcaaatttatccagttcctcagctgtttgatattgctctagaaatggttttgaatacaggtacaaacttctatgcctatcaactatctacaaccttacaaaatgactccaaagagaatattcaaaactaccaaagaggtatttctgcattaagatacatgccagtcttgaaagatacaggtaaagttgaattatttgttcaagagatcgttgtttcagaggaggacagtgaaaagaataacaaggatggaaaaaagagtaatctttcctcaccatcttctgcgtcatctagtgcttctcctgctaccaccgtgactaagaacgctagtgaaaagttaacttatgaaaaatccagcactaaagaggttagaaaaccaagagatattcctaatgatgttcatgattttatcggccaaatgttacctcatgaatactatttctatagatccataggactggttactggaaaattatttgacgcaattgtcacaggagtttatcctgaagagcctccattgggcggaggatcttctacatcctacaagaaactggtttccaagtccgttgaaatcttcaagaataaagaaatcaatttattaactcaaccaattaacagatactatcagattaaacaaattaaacaagtcaagtggtatgcggcaaatgagcctaccactttgaccaacaggatgtcaccttctatgtttgaaactatcaaccacttaattgttaaaacagaaacgtctgatgaaaaggaattttctatctctgagttcattacaacaataaatggttctagcaatatggcgaaagattttatatctgaaaaagtcattttcccaaactccgtaccaatcgaatccaaattaaactcaccatttaatttattgtcgaccaatttcttaagattactagtactattggagttcttcacttttgatttcaaggaaaaactgctagagcctacgagatggggtgaggtattcttaaaattaaatgagctcaatattgacagtaagtatcacgaatcagttattatctttttggtatttttgaaatgcgatgtcttaaaacttgacgaagaagttcaaccaccggctccctcagccctatctcaagccactcttcgttcatatcctgaagaatcattgtacgtcctattgattacgcgtgtattaactttatttcaagtggaccaaaagccatcaaattaccacggaccaattgataagaaaactttgatctttagagatcatctttctttcataaaggaaaatttaaatgaactttttgaagccgttttgatctcatctttaacttctggcgagtttaatagattatcacttgataactttggttgggcaagaaagattgttagatatttaccgttcaaattagattccccaaatactataatggctatgatgtgggagtttttcttacaaaaatatcttcacaatggtaatgccaagaatgatgcattgtctttagttgctactgaattcaacacttacaaatccacaccaaatcttgatgaacagtttgtcgaatcccatagatttcttcttgaaatttcaaaagtcatgcaggagctaaatgctgcgaaattaatcgatgaaaacgtgtttaaattattcactaaagcagttgagtttactacaacagctctatctagctgaagcgtgagaatgagtatgatggaaatagtggaactatttaaaaagcacccaataaagaaagatagttactgtaaagaggtatattatcattattcagagggttcaagtaccatcatcaagatttaacacaagcacagtgaatagcaacaattaaagaaaaaactaatcaaaatcacggtagaaataggagaaaaaaagtaaaacagaaactaagtcactgtttctttatatgacatattctattatataaatatgtaaagaacgctgaacagtaa

SEQ ID NO: 2627 - DNA, 3903 bp, Saccharomyces cerevisiae
aaacatcgtgcgtttacataatatcttgaaaagcaaacagatatataaaccgctattgaaattacctttttaagtattcgcctagaagccttgtttcaagtagcatcaacaacaggtgttaggttaaactgctttgactttttgttctttaacgaatatcattaaaaaaaaaggacatctataaagaatgtctccaaactcgtcgaaaactcgaacggaccagataagctccatgcctggtattaatgaagccacgaaggtggaaagtaagaatgttgtgaaggatgctgttccaataaaatctgaagttgaaaccaatggtacatcaatagtaagagaaaaacaagatccatcgtacgttggttggaaacaagttggtggttgggaggaaaaggacgagttaacttccgaagaccttttagtggacgtaaacaaggacacttttttggggaaccttttaccagataaattctatggtgattggtatcatgaagtcgctattctcatcatcgctggtttatgttcctttgtgctgggctattttaaattctctctcgcgtccgtccttatcgtgatgctaaccacaggaatgttatatagaacttcgtccaaaaaatatagggaatcgttaagggatttagcccagaaagaacaaactgtagagaaaattactagtgattatgaatctgtcgaatggttaaacacctttttagataaatactggcccattatcgaaccttctgtctcccaacaaattgtcgatggtacaaatactgcattatctgaaaatgtggcaattccaaagtttataaaagccatctggctggatcaatttacgttaggtgtgaagcctccaagaattgatgccataaagacattccaaaatacaaaatctgatgtcgtagtcatggacgtatgtctatcattcactccacacgacatgtctgatcttgatgcaaaacaatgcaggaattacgtaaattccaatgtcgtattaaaggcaaagatattcggaatggacatacctgtttcagttgctgatattttttttcaagtttttgttagatttcgtttccaattgatgacaactttgcctcttgttgaaactataaatattcagttattggaagttcctgaagttgattttattagtcgtttattgggtaactccgtctttaattgggaaatcctggctattccaggcttaatgagattgattcaaaaaatggcatttaaatacttgagccctgttttactcccacctttctctttgcaacttaatataccacaacttctttccaagactggcttacctataggtgttttggaaatcaaagtcaaaaatgcccatggattaagaaaacttgtgggcatgatcaagaaaacagttgacccatacttgacatttgagctctctggtaaaatagtcggtaaaactaaggtttttaaaaattctgctaatcctgtttggaatgaatccatttacattctgttgcaatcttttactgatccacttacaatagccgtatatgacaaacgcgaaaccttaagcgacaaaaaaatgggtacagtaattttcaacttgaataagttacatgcaaatcactatcacaaaaatgaaaaggtacatttcctaagaaattctaaacctgtcggtgagttgacatttgatttgcgatttttccccactattgaaccaaaaaaattactgaacggtgatgaggagcctttaccggatatgaatacaggtatcaccaaaattactattcgcgaactcaagggactggatgaactaagtgacaaaaaattcgtctttgcagagttgtatgtcaatgcagaattggtgatgaccacaaagaaagagaaaagaactgcccatttgaaatggaactcagattattattctgtggtaacagaccgtagaaagactatctgtagatttgttttgaaggatcagagtggtaaagtaatttcatcttcggtacaaccattaaatcatttgatagatagaacagaagtcaataaagaatggattcctttaaggaatggaaagggagaattaaaagtcaccacttactggaggccggtagatatcgacctcggattgaaaagtgtaggatatactactcctatcggtatgttgagagtgtttatcaataaggctgaaaacttgagaaatccagatagcttaggaaagataagtccatacgccaaagtatccgtcaatggtgtggcaagaggtaggacaaatgaaagaatagagacattgaatcctatctggaaccaatcaatttatgtgtctgtcacatctcccttacaaaaagtctcaattgactgtttcggtatagatacaaatggcgatgatcataatctcgggagccttaatattcaaactcagaatatatatcataaagacaatgacgataaatataccatttttattgacaacgctccaagaactggcaacttaattggaaagaagggtgtaaaggggaccgttacgtattatttatcattttatccagttgttcctgttttaagcttggaagaggcgaaggaagttgacgagattaatgagaaaaaagataagctagaaaagcagaaaagtacactggatgacaaaaacatctcaaaggaggagaaagaaagaattaaaaaggaagagttcaggctcaccgaaaaatatgacatgtatagttacaaaatgaagcttgacctcgatgaattgctgcaatacaatgctggtgtactaggtgttactgtattaggcggggaactaccccagcctgggctctatgttcaaacattttttgattcctgtggttacgcagcgataactagtgcaaaaaatgctattaggaccattaaaacaggctggtcgggcgatttcatgataaaagagctggaatggtccgtgactacatttagggtaacaaagactaaagacgcgaataaggcggaaaattttatttgcgaagtcaacattccaacaattgaattggtgaggaactgttattacaaaccttccgtattaaatctaatagggaaaaagagtgccaaactattagttcaagtgtcatggttccccgtaactgccacggaattgcctcaatcagacttgataactaactctggtgatttgaaaatcaccgctaaaagtgctgaaaatctaattggtgttaataagaatggttattccgatccatatgtcgaattctttttgaatgaaaagagcacatcacccttctttaaaaccgcagttcaaaaaaagacactaaatcctacctggaacgaaagcaaaactatcgaagtttcaaatcgtgtcaatgactacttgacaattaacgtgaaagactacgaatccactaactccaataggagtattggaaaagccgttgttccattatctactattgatccagagagcgataccacctttaatataccgttagtgggaccaaagggagaagatggcggtgtgctacatcttgaatttgagtttgaaccccgctatactaccaatgtagtcaaacgtgaagccgggcttggaaattttgccacgaaaggattaggtacaggcatcaaagctggttctacagttttcgccttaggaaccaatgttgtaagcaccggattaggaacaattgataaagtaaaggccggagtctttggtggcaagaagtctacaaccactggggacaaaaaatccgaagagaagcaataattctatcgatggtaaagagtatgtgtcacgaaatcatcttgatgccgcaatgtacgagcaaaaaaagaaaagagaaatcaatcttaacaactcaaccatgccgagtgctactatagtacttttctttattactacgtatgtaaattgtaacaaatgtgtacttttatgtgtgttcttaa

SEQ ID NO: 2628 - DNA, 843 bp, Saccharomyces cerevisiae
tctccaaaggtagttattctgataatttgaaccaaaagtccccagattaagtcttaattaaactgcccttgcataccgctgtaaacgatttgtgtgcagacatcaattgctgaaacgttctgctttggttgtgcttttgatcccgtactatgtctgaaaaggccgttagaaggaaacttgttattattggtgatggtgcttgtggcaagacctctttactatatgtatttacattaggaaaattccctgaacaatatcatccgacagtgttcgagaattatgtcactgattgcagagttgacggaataaaagtgtccttaacgctctgggatacagcgggacaagaggaatatgaacgtttacgtccattctcatattcaaaagcagatataatattaattgggtttgctgtagacaattttgaatcactaattaacgcaaggacgaaatgggcggatgaggcattacgatattgtcctgacgcaccaatcgttcttgtaggcttgaaaaaagatttgaggcaagaagcccattttaaagagaatgctaccgatgaaatggttcccattgaagatgcaaaacaagttgcaagggccattggggccaagaaatacatggaatgtagtgcactgactggtgagggtgtggatgatgtctttgaagtagctacaagaaccagtttgcttatgaagaaggaaccaggggctaactgttgcataattttataaaaaaaacttacactgaaatgatacattatctttttagcaagggagggaaaaacaataccgtattataattttaatcaaatttcatagatataatggaataagttaaaaaggctta

SEQ ID NO: 2629 - DNA, 2085 bp, Saccharomyces cerevisiae
ataaagtatacgaagctgttatactattcgtgatccagggcaaaaatttagcatcattaaggcatatatatcgcaaatagtgggttgcacaaggctttcaataaacagtgtcatatgtttctctagctctgtcggtttgttggctataaagagtttgtctagtaatcgccgtcttttcttgggaccattaacacagacaaggacattgaaacttggctataagttccgtcaaagggggaaaaaattgctttggagaaggaataaaaagatgaatagtcaaggttacgatgaaagctcttcctctactgctgctactagcggtcctacttctggagacccacgaatgggtaagaaacaacggtttatgaatctcataagaaccacaaaggatgtttatattcctaacctgacgtcatccatttctcaaaagacaatggatggcatcaggagcactacgaattccttcgaaggttataatgacttgcctatggaattgccacataataccacgataacatattttccaacgtataccacaactaatttggttgaccctgacggtttgagtgcgcctcggaaagattttgaaactactgtcagatgtgctgtttcttatccaggaaatcctacaagcaggagaaataggtggttgctttctctttgtaaacaatatcttagaactggaacggcggaggccgatgttgcacctgttgttccccctcatctcgaagaggattctggagatttaaacgactcccaatcaagtatagaaagttctttgtcttcaaagagcgaaaataggtattcacatatgggcatccaagaggaagatgttctgaatgagagaattcaaggattcctgtccaaaaaagttcctaatactccagtggtggttgacctattgcccaaagataagctcagaggggatacggcttccttttttggtaccacggactcttatggtaatttactaatcaaggcagaaacagattttttaccgtccaagattaatattacattagatacccctatagaaggccatgcagatcccatatctgaaacatttccggccaattatgtctcgccctacggtattggtttaatcagtgatattgacgacaccatcaagcatactggcgttacgggtgacaggagatcgatgtttcgtaatgttttcatccatgatgttcaatcgtgggtaatagatggtgttcctctttggtacaaaactttacatgatgtcgcagacgttgatttcttttatgtttctaattcacccatccaaacttttactcttttgaaacaatatatttgcgccaattttcctccgggtccaatttttttgaaacaatactctggtaatttcttttccactatcatgacttcaagtgcgaatagaaaaattcagccgattgcaaatatcttaaaggattttcccaaaaaaaaatttattttggtcggtgattctggtgaacatgacttagaagcgtataccactacggctttacaatttccgaaccagattctggctatttatataagatgttgctctaattccatgagtgatgtcccatcgcatgatgaagaagttatgaatgaagtgaacaatatcatcgaattacaacaacggcccatgcaaatgaccaagtctaccgtacgtaccaggagaagaccaccaccacctcccattccttccactcaaaagccatcgttgacagaagagcaaaccgaaagtataagaatgtcacgccgtaataaagatgagaacaatgctaaaagagttgccccaccaccgttgccgaacagacagttacctaacttagacgctaatacttactatgtaccatcctcacaaaatgactatggcatgtatggtgctttcatggataaaaaagcagatgaatggaagagaagagtaatggactcaattcaaaaattgagcaatcaagacaccacattgatgttcttttcggatccggcattaagtttggaagacagtattcgcagaattagggagaagtattcaaactaaatacactgttatttatatacatcgggagggagtttaaaaattgtatacactaa

SEQ ID NO: 2630 - DNA, 866 bp, Saccharomyces cerevisiae
caaagacagaagcagcacaccatttaccaatacagcttccaaaatggtaaatttttatgatgacgtggatgagtcgaaatcacacggtgaattcccattaatacccgttgtgcttcaaaattcatcagagctatcagtcagaactatacctaccgggaatgaaatcattgagtcagtgcacctgaccaaatggttacggaaatatagaaacgcacttgccagtcaactagatcgttatgagaaggggtggcaatccaagatagccaactttaggctccaggtccaacatgttatcaattattcgagaaagaatattttcaatgttgattctgaaaataaacatactgtggtcccggggtcattaatagcgttaggtgccttttttgctggaagcatagctgtgaacaggtctaattggggagctaaaaggttgatatttggtcacaaatctagtatcctcgagaaactatgtacgtcattgccatctaggatattgttaccatgggtattggcagcagctacattcaagtattgggctccacagacatcacagaatttggtcaatgccactgaaaatgatttactgccagctgatttcgtcaagtcatatcacaatacttggaaacgaatttatgaggaaggatatgttgccaagaaatgtgatttaaaacgtcaaatcgatcagacattacaaaaaaatataaggtatgcaagggaacagctttatgaaaagttggagcaagcatgatatcaagcggatatctttttttgttcattatcatgtccatagtaagtatgtccatatataaatcggataattaatattctataaaattacccattaaataaatttcatttattttgaa

SEQ ID NO: 2631 - DNA, 2510 bp, Saccharomyces cerevisiae
cacaatatagttggatatcatttaccttgatctgctcttgctttcgaggtgacatagcatttttagccatctgattccttaggttcaaaggcactcatcattcctcctctaaaacacatttcaacgtcattcataatctggaatcaacataacaatatcctagaacacatcatcaatggtcactaacaatggagatggtgagcaccttgggatccgaagaaacggaaatttaaggcatccttccaataatatgaaaattcccagaagggctcaatcaacagttctcaattcaaacccattttatagtaggaagtattctatgtctaccttaacgccgagggatatatgtcgaagcgttgattctagagtatttgtggatatgtcttctcccaattttcagactctggaggatccccacagagatgagattataaacagtgtacggcttaactacttgaacagtagcaaaagaagttccgtctctcatggaaatgaagcaatccctagggttaatccgactaagaattcttcagcaagtaccatagctgcagcaaatgttgatagtgatgacgatgagactaacctgagtagcgctggaggcgacataacgcatgatatttacaagttggttaaagcagaggatcctaaacggctcagacgccctcggtccatggaaaatgtaacacctaaaattgagcaccatactaaattgtcatcagcaagtggtttaaatgtccccggtggcttcagaagggaatttattgtcaacaaaaaaaggcaagaacatcaattaaatgattccgctagctcagacttcacttcgcatgaaagcgattcgattaaccagtcatctccatcttctaaccaagatatcgataaggtcccctttttaacaagaaactttttggaatttctatacgtgtttggacattttgctggtgaatccttcgaggatgattttatccctgatagctcaaacatgatgatacgcggagaagatgaaaggagtgcattgctgtctcggcctgaccatatgaaagtattaccttcagccaaaggtacgacttcgacaaagaaggtttttttgatattgcttaaatctttcattggaactggcgttttatttttacctaatgcctttcataatggtggtttgtttttctcagtaagtatgctggccttttttggaatttattcatactggtgttactacatattggtgcaggccaaatcttcatgcggtgtatcctcctttggtgatattggtttaaaactgtatggaccttggatgagaataataattcttttctccctagtaataactcaagttggattctctggagcttatatgatatttactgcaaaaaatttacaagcttttcttgataacgtattccatgtgggcgtcctacctttatcttacctgatggtctttcaaacgatcatttttattccactttcgtttattagaaacatttcgaaattgtcactaccatctttactagcaaattttttcatcatggctggtttagtcattgtcattatttttacagccaaaaggttgttttttgacctgatggggaccccagcaatgggtgtcgtctatggcttaaatgcagaccgttggacgctgtttatcgggacggcaatatttgctttcgaaggaatcgggttaattattcctgttcaagactcaatgagaaatcctgaaaaatttcctttagtacttgctttggtgattctaacggcaaccatacttttcatttccatagctacattgggatatttggcatacggctcaaatgttcaaacggttatactgttgaacttacctcaaagtaacatttttgtaaacttaatccagctgttctattccatcgcaattatgttgtccacacctttgcagttgtttccagctattaaaattattgaaaataagttttttccaaagttcactaaaatatatgtcaagcacgatgatctaacaacaagagtcgaattacgtcctaattcaggaaagctgaactggaaaattaaatggctgaagaactttattcgttctataatcgtaatcattgttgtatcaattgcttactttgggtctgataatttagacaagttcgtttcagttataggatccctcgcctgtattcctttggtatatatatacccatcgatgctgcatttacggggcaatagccttccagagactaaaggggaattttggagattcaaaccaatgttagataccattttaattttcttcggtattgcaagcatgctttatacgtcttaccagagtatattcggtgtctagacgatatatgttgttgcttcataaagaatttatttggaatcgaggaacactattttgccattgtcgccattgacagcttgcagttgcaaacgtcttcttaattcactttatataaacaaggaccgccaggtcacagtattattcgcacgaaattatgtagtaggtaaaaaacactaaaagcattacccctata

SEQ ID NO: 2632 - DNA, 1801 bp, Saccharomyces cerevisiae
attaagcactattaaggcaaatttagagcaaatatgacttacggtggtagagatcagcaatataacaagactaactacaagtctagaggtggcgacttccgcggtggaagaaactctgatagaaactcttacaatgacagaccacaaggcggtaactaccgtggtggtttcggtggtcgttccaattacaaccaaccccaggaattgatcaaaccaaactgggatgaagaattacccaaattgccaactttcgaaaagaatttctatgttgaacacgaaagtgttcgcgacagatcggacagtgagattgctcagttcagaaaggaaaatgaaatgactatttccggacacgatattccaaagccaatcaccactttcgatgaagctggtttcccagactacgttttgaatgaagtgaaggctgaaggatttgacaaaccaactggcattcaatgtcagggttggccaatggctttatctggtagggacatggttggtattgctgccactggttccggtaagactttgtcttattgtttaccaggtattgttcatatcaacgctcaaccattattggctccaggcgatggaccaattgttttggttttggctccaactagagaattggctgttcaaattcaaacagaatgttccaagtttggtcatagttccagaatcagaaatacctgtgtctacggtggtgttccaaaaagtcaacaaatcagagatttatctcgtggctctgaaattgttattgctactccaggtcgactaattgatatgctagagattggtaagactaatttgaagagagtcacttacctggttcttgatgaagctgatagaatgttagatatgggttttgaacctcaaatcagaaagattgttgatcaaatcagacctgatagacaaaccttgatgtggtctgccacttggccaaaggaggtgaagcaactagccgctgattacttgaatgatccaattcaagttcaagttggttctctagaactatctgcctcccataatattactcagatcgtcgaagttgtttctgatttcgaaaagagagatcgtttgaacaagtacttagaaacagcctctcaagacaacgaatacaagacattaatctttgcttctacgaaaagaatgtgcgatgatatcaccaagtatctaagagaagatggatggcccgccttggctattcatggtgacaaagaccaaagagaacgtgactgggttctacaagagtttagaaacggtagatccccaattatggttgctactgatgtggccgccagaggtatcgatgtcaaaggtatcaattacgttatcaactacgatatgccaggtaacattgaagattatgttcacagaatcggtagaactggtagagcaggtgctactggtactgctatatctttcttcaccgaacaaaacaaaggtttaggtgctaaattaatctctatcatgagagaagctaatcaaaatattcctcccgaattattgaaatacgacaggagatcttatggtggcggtcacccaagatacggtggtggtcgtggtggtcgtggtggctatggccgtagaggtggttacggtggtggccgtggtggttacggcggtaacaggcagagagatggtggctggggtaacagaggtcgttcaaactattgaagtcaaagtgattcaattcattcatctctattaataataattatataagttgactgcaccttatttcttcaatgcatgataaaattttatttgctgtatactacatttttaatattttaaagctctt

SEQ ID NO: 2633 - DNA, 601 bp, Saccharomyces cerevisiae
atgactgaagacatcgaacaaaaaaagaccgctacagaggtaacaccacaagaaccaaagcacatccaagaagaagaagaacaggatgttgatatgactggcgatgaagaacaggaagaggaaccagacagggaaaaaattaagcttctcacacaggcaacatctgaagatggaactagtgcctcttttcaaattgtagaggaggatcacacgcttggaaatgcccttcgttacgttataatgaaaaatccagacgtagaattttgtggttactcgatacctcatccttctgaaaacctattaaatatcagaattcaaacctacggtgaaacgaccgcggtggatgctcttcaaaaagggctaaaggacttgatggatttatgtgacgttgtagaatctaagtttactgaaaaaatcaagagcatgtagatgttacggatcgactcaaagaccctctgtcactctgaaatttctaataattatgcacaccacgctagtatagatacagcttgatttgtgtatcccgtttatagtcgtgctatttaaaatctatgtataatataaccagataaaaatacaccttcgtacaaggtgctaataa

SEQ ID NO: 2634 - DNA, 1783 bp, Saccharomyces cerevisiae
caacgcattgtatacgtttgaagctttcagcaaaggatataccgtggaaatgtacacgcctatccctgctaatacccctgctcccactgcaccaacttcatcgatgacgtccaactcttcatccgcatcaaatgccaacaccactagcagtagtggcataaacccaaggaacagagccagtggtactccatccaatgagcgggctcgtccggcgtcgggtatcagttcgtttttgaataccttcggaattaggcaaaatagccagacagcttcttcttctgcggctcctgatcagcgtctattcggcacaaccccatctaactcacatatgagtgtggccatggaaagtatcgataccgctccgcaacagcaggaaccacgtctgcatcatcctatacaaatgcctctgtcggcccagttccacgttcatcgcaactatcaactccccatctccatatctctcactgcccctacaaccacagaccaccagcaatcatctgcgcataatttcgaaggcaacaatgttggtaacgttcaagagtctttgaatcagcggcagcctaacggtactaacaataccacaacctcgataatttccatggcgccagcggctacaacgagaaatatagtcggtggtgcagatggatctactattgttaacaacagtcaggaaatgtataagaatttacgtcacttgatatatgctgcaaaccagccaaatgggaccgaaattttacatttggatttacctgcaacaagtgcagaggagtcaaacaatatgttcaatgtagatgaggtcactttgaagcaaaggaaagataagcatggtctttttagtataagactaaccccatttattgatagttcgtccacgacaaatcaaggtttattctttgaaccgattataagaaaggctggccctggatcccaattggttattggccgctatactgagcgtgttcgcgatgcaatttctaaaatacctgaacaatatcatccagttgtatttaaatccaaagttgtttcaaggacacatggttgttttaaagttgactctcaaggtaactggtatataaaggatgtgaaatcatctagtggaactttcttaaatcaccaaaggctctcacccgcttcctctttatcgaaagatacccctcttcgtgatggtgatattttacagttaggaatggattttagaggtggcacggaagaaatctatcgttgtgtaaggatgaggattgagctaaatagatcatggaaactaaaggcaaattcgttcaacaaagaagctttacagcgtttgcagaatttacaaaaattaactacaggtattgaagaagaagattgttcgatttgcctatgtaagatcaaaccgtgtcaagcaattttcatatcaccatgcgcacatagctggcatttccgttgtgtaagaagattggtcatgctctcatatccgcaatttgtttgccccaactgtagatcaagttgtgatttggaggcctcctttgaaagtagtgacgaggaagatgaaagtgatgtggaaagtgaaggtgatcaactggtggatcaacttagcgtcttaatggaaacttcaaaggatgttgatagccatccttaaggtcaaagaaaatacacagtttgaaaaataaagaaaaaccaccgaactccacatctcgtaccttaatattattttaattattctcttagtatttatatatttgcgccgtttacatatttgacttattgttttcaggaatacaatacctccatcgttggcagtcaa

SEQ ID NO: 2635 - DNA, 3166 bp, Saccharomyces cerevisiae
gtaaataaaaaagttctacgagggtttaaatacggaagtttatttagaagatatttatactctgaatacacacgtagagtacagtaaaggttttttagatctactaatgaccatatcgttgagcaatataaagaaaagagaccattctaaaatttccgatggaacttctggtgaatcatcgcttgtaaaaaggaaacagttggaaagcgccaccggagatcaagaggaagaatatacagaccatgaaatcattatagagccgttgcactttgctaataataataacactgtactcacagattcagaaaattatctaagatggcaaaataccatctccaacgttgttaaatcagtggtttccattcatttttcacaagttgcgccattcgattgcgattctgctttggtatctgaagctaccggatttgtcgtggatgctaaattaggtataattctgaccaataggcacgtcgttggtcctggtccgttcgtaggctacgtagttttcgataatcatgaagaatgcgatgttataccaatttacagagatcctgttcatgattttgggttcctcaaattcgatccgaaaaacataaaatattctaagatcaaagcgttaacgctaaaaccaagtttggctaaggtcggctcagaaattagagttgtcggtaatgatgccggtgagaaattaagtatcctagcaggttttattagtagaattgacaggaacgctccagaatatggtgagctgacatacaatgacttcaatacagaatatattcaagctgctgcatctgcttctggcggttcaagtggttctccagtcgtaaatatagatgggtatgctgtggctttacaggcaggtggctctacagaggcatctactgatttttttttaccgttagatagaattcttagagcgttaatttgcatccaaaccaacaaacctatcacacgtggtacgattcaagttcaatggctgctgaagccttatgacgagtgtagaagattaggtttaacttcagagagagaaagtgaggctcgtgctaaatttcccgaaaatatcggactgttggtagcagaaaccgttttaagagaaggcccaggctatgataaaattaaagaaggtgatactctaatttcaataaacggtgaaaccatatcttctttcatgcaagtggataaaattcaagatgaaaatgttgggaaggaaatccaattggttattcaaaggggcggtgtcgaatgtactgtcacctgcactgttggtgatttacatgctatcacccctcatcgttatgtagaggtttgtggtgcgacttttcatgaattatcatatcaaatggcaaggttttatgcgctacctgtcaggggtgtatttttaagtagtgcatcagggtctttcaactttgattcaaaagaaagagtgggttggattgtggattctatagacaataaggaaacccccgacttagatacatttattgaaattatgaaaactattccagatcgtaagcgcgttactgtacgataccaccatctaacagatcagcattctccacttgttacttctatttacattgaccgtcattggtgcaatgaattcagagtttacacaaggaacgatacaactggtatttgggattacaaaaatgttgctgatccacttccagccgatgcgttgaaacctcgttcggccaaaattattcctattcctgttaataatgaaaaagttgcaaaattgtcatcatcgttatgtacagtggctacaatggcagcagttccattggattcactttctgctgatattttaaaaacatcaggcttaatcattgatgctgaaaaaggttatgtcctagtgtccagaagggtagttccacatgattgtcttgatacttttgtcaccattgcagattcccttgtagttccagccacagtagaatttctccatccaactcacaacttcgctattgttaaatatgatccagagttagtaaaggctccactaatcactcccaagctatctaccaccagaatgaaacgtggtgataagcttcagtttataggttttacccagaatgatagaattgttacttcagagaccactgtcaccgatatttcctctgtaagtattccaagtaatttaattccgaggtaccgtgccactaatttagaagctatatctatcgactgcaacgttagcaccagatgtaattccggtattttgacagataatgatggtacagtaagaggtttatggcttccatttttaggcgaaagattagaaaataaagaaaaggtttatttgatgggattagatataatggactgtagggaagttatagatatcttaaaaaatggcggtaaaccaagagtaagtatagttgatgctgggttcggttcaatttccgttctgcaagccagaattagaggtgtgcccgaagaatggatcatgcgtatggaacatgaatcaaataacaggctacagtttatcactgtttctagagtttcttatacagaagacaagattcatttagagaccggtgacgtcattttatctgtgaacggaaaattagtcactgaaatgaatgatttgaatggagttgtaagctcagctgatggtattttgccatcagccatgttagattttaaagttgttcgtgatggtaatattgttgatttgaaaattaaaaccgtggaagttcaggaaaccgaccgttttgtaatatttgcaggtagtatcttacaaaagccgcatcatgctgttttgcaagctatggttgatgttccaaagggtgtctactgtacattcaggggagaatcgtcaccggcgctccagtacggtatatctgccacaaacttcataactcatgtcaatgaaattgaaacacctgatctagatacatttttgaaagttgtcaaaacaatccctgataatagttattgtaaaatgaggttaatgactttcgacaatgtgcccttcgctatttcactgaaaacgaattatcattacttccctactgcagaattgaagagggacaacatcacgcacaaatggattgaaaaggaatttaccggcaacagccaaagtgaaaaataggccagatttgataaaacatttatatatgtatgtatgtatgtatacatcaaagtcttccataaagaa

SEQ ID NO: 2636 - DNA, 996 bp, Saccharomyces cerevisiae
tatagaatagaaacatagttgatgtttgaacctttacatattcctttcaatcgtgtcgagcgatataagtattacgattatgccggcgaaaactgaacccgttttagacaatttcaatcaacatactccactccgtagtgagtaacttttggagtaatacgaagtaaccaaagaggtcaaaacggaactatataccccaaaataagcatcattcaaatggtcgaattaactgaaattaaagacgatgtcgttcaattagacgaaccacaattttccagaaatcaggccatcgtggaagaaaaggcttctgcaacaaacaacgacgttgtcgatgatgaagatgactctgatagtgattttgaagatgaatttgatgaaaatgaaacattgttggacagaatcgttgctttaaaagacattgtccccccaggtaagagacaaacaatttctaatttttttggttttactagctcttttgtgagaaatgctttcacaaaatccggaaaccttgcttggactttgaccaccactgctttgttactcggtgtgccactatccttatctatacttgccgaacaacagctaatcgaaatggaaaagacatttgatttacaaagtgatgctaataacatattggcccaaggtgaaaaagatgctgcagcaacagccaattaattttaatgatgtaaaagaaaagagagggttttagaaaaggagccatacatgttccaatgggacactaactaaccaatttattttgtttgcacagttctatttattgctttagagtaaagttgaagaaaaaaaatcttcgttttaaaccgctatatcaatacatagtcatagtgtacccattcagacttctatgaacttccgatgcgaaacatttttttttgcctttttaccttttctgttcattttatctagcattccttaggttaatttaaacaaatgtataaacttgtacatatttcaaataaaaaactttcagtttta

SEQ ID NO: 2637 - DNA, 3335 bp, Saccharomyces cerevisiae
tacgcaatagagtatataagccaagtcaccttttatatttcttagtttttaacttgcaaagacttataagagacttataaaacaaggagaaaatggccaaaaaagctatcgattcaagaatcccgtcactgatcaggaatggtgttcaaaccaaacaaaggtccatatttgtcatcgttggggacagggcacgtaaccagctcccaaatttacattatttgatgatgagtgctgaccttaagatgaacaagtccgtcttatgggcttataagaagaagcttctaggattcacttcgcacagaaaaaaaagagagaataaaattaagaaagaaattaaaagaggtacaagggaagtgaatgaaatggacccttttgaatcttttatctctaaccaaaatatcagatatgtatactacaaagagagtgagaaaatattgggtaatacctatggtatgtgtattcttcaggacttcgaggcattaaccccaaatcttttagcaagaaccattgaaactgtagaaggtggtggtattgtggttattttattgaaatcaatgtcatcgttaaagcaactgtacaccatgactatggatgttcacgcccgttatcgtactgaggctcatggtgacgttgttgcaagatttaacgaaagattcatactttctttaggttcaaatccaaactgtttagtcgttgatgatgaattaaatgttctaccgctatctggtgccaaaaacgtgaaaccactacctcctaaggaagatgacgaattgcctccaaagcaattagagttgcaagaattaaaagaatccttagaagatgtccaaccagctggttcattggtttctctatccaaaactgtcaatcaagcccacgctattctttctttcattgatgccatttcggaaaaaactttgaatttcacagttgcactaacagctggaagaggtagaggtaagtctgctgctttaggtatttctattgccgcggccgtttctcacgggtattctaatatttttgttacttctccatctcccgaaaatttaaagactctatttgagtttattttcaaaggattcgatgccttaggttaccaagaacacattgattatgatatcattcaatctacgaaccccgacttcaacaaagccattgtgagagttgatattaaaagagatcacagacaaacgattcaatatattgttcctcaagaccatcaagttctgggccaagctgaattagttgtcattgatgaagctgcagctattcctttgccaatcgtcaagaacttgctgggcccatatctagtcttcatggcatccactatcaatggttacgaaggtacgggtagatctttatctctgaagttaattcagcaattgcgtaatcaaaacaacacatccggtcgggaaagtactcaaaccgccgttgtttcgagagataataaggaaaaagactctcacttacattctcaatcccgtcaattacgtgaaatttccttggacgaaccaatcagatatgctcctggtgacccaattgaaaaatggttaaacaagctcttatgtttagatgttactttaattaaaaacccaagatttgcaacaagaggaactcctcacccatcccaatgtaatctatttgttgtcaatagagatactctattttcttatcatcctgtctcagaaaatttcctggaaaaaatgatggcactgtacgtttcatcccattacaagaattctccaaacgacttacaactgatgagtgacgccccagcgcacaaactatttgttcttttaccaccaattgatccaaaggatggcggcaggatccctgaccctctatgtgtcattcaaattgcattggaaggtgaaatcagtaaggagagtgtcagaaattcattatcgagaggccaaagagctggtggtgatttaatcccatggctgatctctcaacaattccaagacgaggaattcgctagtttgagtggtgctcgtatcgtcagaattgccactaatcctgaatacgcatccatgggctatggttctcgtgcaattgaattactgagagactatttcgagggtaaattcactgacatgtctgaagatgttcgtcctaaggattattctataaagagggtgagcgataaggaactggccaaaactaatttattaaaggatgacgttaaattaagagacgcaaaaacgttgccacctctactattaaaactttctgaacagcctcctcattatctacattatttgggtgtttcatatggtttaacgcaatcgttgcataaattctggaagaataacagctttgttcctgtttatttacgtcaaaccgcaaacgatttaactggtgaacatacttgtgttatgttgaacgttttggaaggcagagaatcaaactggctcgttgaatttgccaaagatttccgtaaaagatttctgtcgcttctttcttatgattttcataagtttactgccgttcaagccttaagtgtcattgaaagtagtaagaaagcacaagatttgtctgatgacgaaaagcatgataataaagaattgacgcggacgcatctggatgacattttttctccatttgacttgaaaagattggatagctactcaaataatttgctagattatcacgttatcggtgatatgatacccatgcttgctcttttgtacttcggcgataaaatgggagattcagtaaaactatcaagcgtccagagtgctatcctgttggctatagggttacagcgtaaaaacatcgacactattgccaaggaattgaatttaccttccaatcaaactattgctatgtttgcgaagatcatgagaaaaatgtctcagtacttccgtcagctgttaagccaatcaattgaagaaactctaccaaatatcaaagatgatgctattgctgaaatggatggtgaagaaatcaaaaattacaacgctgcagaagcactggaccaaatggaagaagatttagaagaagccggttctgaagccgttcaggcgatgagggaaaaacaaaaagagctaatcaactccttgaacttagataaatacgccataaatgataacagtgaggaatgggctgaatctcaaaaatctttagaaatagctgccaaggccaaaggcgtcgtcagtttaaaaactggtaaaaagagaacgactgaaaaggctgaagatatctatagacaagagatgaaagctatgaaaaaaccaagaaagtctaaaaaggctgcaaattaagcgttctactctttgtcaaacccttttatagctaaacgtttacttaatttgtacaataatatagaatagaaa

SEQ ID NO: 2638 - DNA, 1761 bp, Saccharomyces cerevisiae
aagttgcaaccgtgtgaaatcgaatcatgcctgactctaagtacacaatgcaaggttataaccttgttaagctattaaaaaggctagaagaagccactgcaagattagaggatgtcaccatctatcaagaaggttatattcagaataaattggaggcatctaaaaataacaagccttccgactccggggccgatgcgaatactacgaatgaaccttctgcagaaaatgctcctgaagtagaacaagatccgaaatgcataactgcgttccaatcttacatcggtgagaatattgatccgctggtagaattatcaggaaagatcgacacggtggtcttagatgctttgcagttgctaaagggaggctttcaatcgcaattgacttttttaagagctgctgtgagatcaagaaaaccggattattcttctcaaactttcgctgattctttaagacctatcaacgaaaatattataaagctgggtcaattgaaggaatcaaaccgtcaaagcaaatacttcgcatatttgagcgctttatctgagggtgctcctttgttctcctgggttgcagtggacactcccgtgtctatggtcacagatttcaaggacgcagcacagttttggactaatagaattttgaaagaatacagagagtctgatcctaatgctgttgaatgggttaagaaatttttggcctctttcgataatttgaaagcctacattaaagagtatcatactactggggtttcctggaaaaaagacggtatggattttgctgacgcgatggcacaatcaacgaagaatacaggtgctacttcatctccttcgccagcaagtgctacagcggctccagcaccaccacctcctccaccagccccaccagcttccgtctttgaaatctctaatgatacaccagcaacgagtagtgatgctaacaaaggcggtattggcgcggtcttcgccgaactaaatcagggtgaaaatatcactaagggtttgaaaaaagtagacaaatcccaacaaactcacaaaaatcctgaattacgtcaatcctctacagtttcttccacaggaagtaaatccggtccaccaccaaggccaaaaaagccatcaacattgaaaactaagaggcctcctagaaaggaattggtaggaaacaaatggtttattgagaattacgaaaatgaaactgaatctctggttattgatgcaaataaagatgagtctatcttcataggtaaatgttctcaagttcttgttcaaataaaaggaaaagttaacgctatctcgttgagtgaaactgagtcatgcagtgttgttcttgattctagcatttccggtatggatgtcatcaaatccaacaagtttggcattcaagttaaccattccctacctcaaatctccattgataaatctgacggcggtaacatctatttatccaaggaatccttgaatactgaaatctacacctcgtgctcaactgctattaacgtcaacttaccaatcggcgaggacgatgattacgtagaattcccaatccctgaacagatgaagcatagcttcgctgatggtaagttcaaatctgctgttttcgaacatgctggttaatattgcgaggagcattaattgtatttagttaaaagaaataaatcacatttgaatcaatcagaaagaaaagtgaatgaataaacaattatatactttttgtaaaacctttttttcatgtgtaaccttttcttaaagaagtaacaggaaaacgagg

SEQ ID NO: 2639 - DNA, 406 bp, Saccharomyces cerevisiae
tgtaaatagtggctaaaatggttatattacacaattcgaaacagtgaaattaagaaaagaaatggcggaaaagcagaggcagttgaagttgcagaagatatacaaacaaaagtacatcggactgggagatgagagcactacacgagaacagtggcagagaaatgtgagaaacgatacactaaatacattacaaggccactccgcatctttggagtacgtttcattgagccgaggagaccttagtatacgtgacactcgtattcacctcctgaaatccatgtcccctggctataaagcctacttacgagaagagaggtaggacgttgaagccacatccataaataatttttacataaaattacgcctcgtatgtcgttctcaagatttatggtagagatcacactca

SEQ ID NO: 2640 - DNA, 1226 bp, Saccharomyces cerevisiae
ttattttgaaataataactaccattagaactaacaaaagaaaagaaaaaaaaaataatggtttctgtggagtttttacaggagttaccaaaatgtgagcatcacttgcatttggaaggtactctagaacctgacctattgttcccattagctaaaagaaacgatataattctacctgaaggttttcctaaatcggtcgaggaattaaacgaaaagtataagaagtttcgtgatctgcaggatttcttagattactattatattggtactaatgtcttgattagtgaacaagatttctttgatttggcgtgggcctattttaaaaaagttcacaaacaaggcttggtccatgctgaagtgttttacgaccctcagtcacatacatctaggggcatctccatagaaacagtcactaaaggtttccaaagagcttgtgacaaagccttctctgaatttggtattacatccaagctaattatgtgtctgttaagacacattgaaccagaggaatgtttgaaaactatcgaagaagctaccccatttattaaagatggtactatctctgccttaggattagattctgctgagaaaccatttcccccacatttatttgttgaatgttacggaaaggccgcctcattgaataaagatttaaaactaactgcacacgcaggtgaagaaggccccgctcaattcgtctcggatgctttagacttgttgcaagtaacaagaatcgatcacggtatcaacagtcaatacgacgaggagttattggataggttgtcgcgcgaccagaccatgctaactatttgtcctctctccaacgtgaagctacaagtagtccaatccgtttcagagttaccactacaaaagtttcttgacagagatgttccattttctttaaattctgatgaccccgcctattttggtggttatatcttagatgtctacactcaagtttcgaaagatttcccacactgggaccatgaaacatggggtcgtatcgctaagaacgccattaaaggttcatggtgtgacgataaaagaaagaacggtttgttaagtagagtggacgaagtagtcactaaatattcgcattagtaccatttgcaagacattgtataatatttttgttgaaagtctttttcgattcataagcgcttttttgtaaatttataacactatgtgtatgcacaaatttcattcgatgtttttgatgctttttac

SEQ ID NO: 2641 - DNA, 629 bp, Saccharomyces cerevisiae
atgttcttgtcgcttgtcttcttcaactgccgtttccctgcgagccggaaaaaagtactgttctttcgaacaaaggcgaaaaaagctgtagctgaaaacagacaactgggaaacgacaattaagaatacgcatgtacgtgtatactactacagtaaaaaagaaagttatttgagagcagcactttgtttactacacagaacattaaccaaaaaaacatgcatcagcaacactccaaatcagagaacaaaccacaacagcaaaggaaaaaattcgaaggccctaaaagagaagctattctggatttagcgaagtataaagattctaaaattcgcgtcaaattaatgggtggtaaattagttataggtgtcctaaaaggctatgatcaactgatgaacttggtacttgatgatacagtagaatatatgtctaatcctgatgatgaaaacaacactgaactgatttctaaaaacgcaagaaagctaggtttgaccgtcataagaggtactattttggtctctttaagttccgccgaaggttctgatgtactatatatgcaaaaataggtttaataatataatctcatataaactcccttccttacagttgaaaacaaaatcaaatcacggta

SEQ ID NO: 2642 - DNA, 1086 bp, Saccharomyces cerevisiae
actcgagctagggcggaagtgtgacaacagtgagctataggcacattgtagtgtacatctactgcaagagcttgcattaattttgatataaaaaaaaggaccatcaactaatttttgctatatttaagaatgtcggcggctatcgaaaaagaaaccggaatgttggatgtaggaaagcactgtgcatattgtagacaactagacttcctacctttccattgttcgttttgcaatgaagatttctgctcgaaccatagacttaaggaagatcaccactgtaggtggttgctagagcatgaagaagttcataaaactgaaaaaagtcctagcaaaagccgggatggctcaagttctaacgatgaagcatatttcaagagtctgttacctgagagggccagtgttagaatccagagagtaagtgaaacaagagagcctttgagaggttctaacactgccaaagtgagctctactttgaactcaaagacattagacaaaatatttaagttcttccaaaggaatgagaaaagaaagagcaataacaaatcaaaaaagaatttcggttcctcgtcgaataagataattcaattggctaatctcaagaaaattgctaaaggtgaccccaagattcctatgcaaaataggatttacatttggtgttacttggtggatggtgatgagacggatatagccaaggaggatacaagaatgccattatacattaacaaaatgtggcctgtgggtagggccatggactatttgtctatccagctaaacgtgaaatctagcacactaactaattcaagttctaatgacaaatttcaactatgcaaattgaaagagggtaaacaagtttcattttataatattggcgcttccttaagagtcactaatgagatcaaagatcttgatactctgtatttagtacacaataacgccgacgaaaaatctaattaagaaggacactataaataacaaacaatcgcgcggaacgtcaagcgtatatactatataaaaagaaaacaaaaaaaatcaataacccattaaagatacataatcaataaaaaacgatattaaaaagcacgtaaa

SEQ ID NO: 2643 - DNA, 710 bp, Saccharomyces cerevisiae
ccccctttggctggatagcttggcctcatcacaactagaacgtaaaaaagtccattaaccatcaaatgcttctcattaaagtgggtatttttatcgaaagaaagggacctgaatatctaactcgccgctatgtcgaatgaaaacttatctcccaatagtagtaacccagatttaactaaactgaataacggcgaaagcggaactattgataccagcaaattctcgcccaacgaaatgaagctatacaaaatgtacggaaagctgccatcaaagaaagatatttttaagcataccatgcagaaaagaaaatatttcgacagtggtgattacgctttgcagaaagctggcattcaaaacaatgatccaataaactatggaaagaataacctgccattaacaaatcccagcaaactacgagaagatataataaaaagaaggataagcacttgtccgtcaactgcctcaaccgctggtgtagtagataatgcgacgttgatacaaaaggagggaagtatatcgagtggaccaccatcgtctaataacggtactattggaggtggtagtacaagttcaacgccagtggggaaccacagctcttcgtcgtccagtttgtatactgaatcacccattagataaatagacaacctgtacttttttatatttttttagggaaagagaagggtctcttatatttaacgcttattatgtga

SEQ ID NO: 2644 - DNA, 1044 bp, Saccharomyces cerevisiae
gacccttggtattcgcacacactaagccaacataggttcgttcaatttttaaaaagaagatggtccggcctcagaatgttcactggtttatcgctacaattgtatttttcatcggatttgtacacgctaatacagaatcaatcttatataaggttcctcacaactttcccctcaaaaaaccaagagacagctctacttatgcaagagatgtaaacttgatatcttccatatcactatcgggagaagcaatgagtcagatcactatcgaggccaataccactgacttggagttgcataatactacgtatattgaactggcggacttacagcgagacgaaacatatcagattaaagtgtgttggtcagcaatacatccaatttccattaataatctccaaactatcacaataccacgtttcactgaatttcagggaactaagtcagactacgcgagaatactagtgactttccaggtcttgtctgactcgtatcctagtgagcatgccatggttccaatacaagtctcattaatcaccactcggctaggtatccccgtggatatttacccaacattaatcgttatggtgctattagtagcagggcttgttgttacccgggcaccacacgtattgaacgatcttttgctgaaattttagtatggaagcctgagccccctttggctggatagcttggcctcatcacaactagaacgtaaaaaagtccattaaccatcaaatgcttctcattaaagtgggtatttttatcgaaagaaagggacctgaatatctaactcgccgctatgtcgaatgaaaacttatctcccaatagtagtaacccagatttaactaaactgaataacggcgaaagcggaactattgataccagcaaattctcgcccaacgaaatgaagctatacaaaatgtacggaaagctgccatcaaagaaagatatttttaagcataccatgcagaaaagaaaatatttcgacagtggtgattacgctttgcagaaagctggcattcaaaacaatgatccaataaacta

SEQ ID NO: 2645 - DNA, 1327 bp, Saccharomyces cerevisiae
cagctcaaaaaacatctacaggattaatcgtcagttaagtaatacagtaatagaaaatgaagttccaagttgttttatctgcccttttggcatgttcatctgccgtcgtcgcaagcccaatcgaaaacctattcaaatacagggctgttaaggcatctcacagtaagaatatcaactccactttgccggcctggaatgggtctaactctagcaatgttacctacgctaatggaacaaacagtactaccaatactactactgccgaaagcagtcaattacaaatcattgtaacaggtggtcaagtaccaatcaccaacagttctttgacccacacaaactacaccagattattcaacagttcttctgctttgaacattaccgaattgtacaatgttgcccgtgttgttaacgaaacgatccaagataagtcatccgccggtgccgttgttgttgccaacgccaaatctttggaagctgtctcattcttcttctctatcatttttgacaccgaaaagcctattgttgtcactgaagattccgcttatgccattccagtcgctaacaataagaacgctaccaaacgtggtgtcttgtccgtcacttctgacaaattagtgtactccggtgtcttcactccacctactgcttgttcttacggtgctggtttgcctgttgctatcgttgatgaccaagacgaagttaaatggttcttcgatgcttctaagccaactttaatctcttctgactcgattatcagaaaggaatacagtaacttcactactccttatggtctattagaaaacggtgttccaattgttccaattgtctatgacggtggttactcttccagtttgattgactccttgagttctgccgttcaaggtttggttgttgtttcttctggttctaccaactcaacctcatctactattgaaagcactgaaatcccagtcgtatatgctcaagctaacactccattaaactttattgacaacaaagatgttccaaagaacgctgtgggtgctggttacctatccccaattaaggcccaaatcttgttgtccattgctgccgttaatggtgtcacctccaagtccgctctggaaagcattttcccatgaactgatagatattaaatctagcgaagcatagagattctttttttaccagtcatcataaccattattttacaaaatttccacgcaacagcttttattttcgttcgtaataggaaccatacttcccattaaagcagtatgattgttttatacacctttttattgttatttaagacataccccaaataattaattaattaattgatgaa

SEQ ID NO: 2646 - DNA, 2512 bp, Saccharomyces cerevisiae
gcaaggtcatataaatttctatatcacacgaataagggttcagatattgctttattatcggcgaacactgatattaccacatagatatcgctctttttttgaaacgtaagcgtaaatttcagtataggtacacgtctgcgctgatccttctgtaatcctctgcagttttcgcaatgtataatagcagcaccaatcatcatgagggtgcacctacttcaggacatggctattatatgtcccaacaacaagaccaacagcatcaacaacaacaacaatacgccaacgaaatgaatccgtatcagcaaattcctagaccgcctgctgcaggatttagtagcaactacatgaaagagcaaggctctcatcaatcgttacaagagcatttacaacgtgagacaggtaaccttggcagcggttttacagacgttccagccctgaattatccagccacaccaccaccacataataattacgcagcttcaaatcagatgatcaataccccaccgccgtcgatgggtggtctttatagacataataataattcccagagcatggttcagaacggtaatgggagtgggaatgcacaattaccccaattatcaccgggccaatattctatagagtcagagtacaatcaaaatttaaatggcagttcttctagtagtccgttccaccaaccgcaaacgctacggagcaatgggtcatattcaagcgggttaaggagtgtgaaaagcttccagaggttacaacaagaacaggaaaatgtccaagttcagcaacaactttcccaagcacagcaacaaaattcccggcaacaacagcaacaacttcaataccagcagcagcaacaacaacaacaacaacagcaacatatgcaaatacaacaacaacaacagcagcaacaacagcagcagcaatcacaatctcccgttcagagcggctttaataatggtaccatatcaaactatatgtactttgaaagacgaccagatttgttgactaaaggaacgcaagataaagcagcagctgtaaagttgaagattgagaacttttaccaatcctctgttaaatacgccattgaaagaaatgaaagaagagtggagttagaaacagaactaacttctcataattggtcagaagaaaggaaatctaggcaattgagttctttgggtaaaaaagagtcacaatttttaaggctgcgtagaacgagattatcgttagaagatttccacactgtgaaagtcattggaaaaggggcatttggtgaagtcagactggttcagaagaaagacaccggaaaaatatatgcaatgaaaactttattaaaatccgaaatgtacaaaaaggaccaattagcacacgtcaaggctgaaagggatgttctggctggaagtgattctccatgggtggtttcgctatattactcattccaagatgctcaatacttatatttaatcatggaatttttgcccggtggtgatttgatgaccatgctaatcaggtggcaactatttacagaggatgttactagattttacatggctgagtgtattttggccatcgaaaccattcataaattaggattcattcacagagatattaaaccagataatattttgatcgatattagaggtcatataaaattatctgatttcgggttgtctacggggttccataaaactcacgactcaaactactataaaaagcttttgcaacaagatgaggcaactaatggtatttccaagccaggtacttacaatgcaaatacaaccgatactgcaaataaaaggcaaacaatggttgtggattctattagtctaacaatgtcaaacaggcaacaaattcagacatggagaaaatcacgtcgtttaatggcatattctaccgtaggtacaccagattatattgctcctgagatatttttataccaaggttatgggcaagagtgtgattggtggtcacttggagcaattatgtacgagtgtctgattggttggcctccattctgttccgaaactccacaggaaacgtacagaaaaatcatgaattttgagcaaactctacaatttcctgatgatattcatatctcttatgaagccgaagatctaatccgtcgactattaactcatgcagaccaaagacttggtagacatggtggtgcagatgaaataaaaagtcatccattttttcgcggtgttgattggaatacaatcagacaagtagaagcaccgtatataccaaagttgagctccatcaccgatactaggttcttcccaaccgatgagttggagaatgttccagattccccagctatggcacaagctgccaaacaaagggaacagatgacaaagcaaggtggaagtgcgccagtcaaggaagatttaccttttattggctacacttactccagatttgactatttgacaagaaaaaatgcgttgtagggacgcgttaaggacattcctctttattcaagtatttatctatggatgtagaacgcacattatgaata

SEQ ID NO: 2647 - DNA, 433 bp, Saccharomyces cerevisiae
aaaacaacaattatcagtaaaaatggttaacgttccaaagaccagaaagacctactgtaagggtaagacctgtcgtaagcacactcaacacaaggttactcaatacaaagctggtaaggcttccttgtttgcccaaggtaagagacgttatgaccgtaaacaatctggtttcggtggtcaaaccaagcctgttttccacaagaaagctaagactaccaagaaggttgttttgagattggaatgtgtcaaatgtaagaccagagcccaattgaccttgaagagatgcaagcacttcgaattgggtggtgaaaagaagcaaaagggtcaagctttgcaattctgaatctctttatgggtttcgcttttgtattttctttgctttaaaatctgatataattacatattattacaatataaaactttacgataattc

SEQ ID NO: 2648 - DNA, 808 bp, Saccharomyces cerevisiae
acagcaaacaaactacaaaaatggtcgctttaatctctaagaaaagaaagctagtcgctgacggtgtcttctacgctgaattgaacgaattcttcaccagagaattagctgaagaaggttactccggtgttgaagtccgtgtcactccaaccaagaccgaagttatcatcagagctaccagaactcaagatgttttgggtgaaaacggtagaagaatcaacgaattaactttgttggttcaaaagagattcaagtacgctccaggtactattgtcttatatgctgaaagagttcaagaccgtggtttgtccgctgtcgctcaagctgaatctatgaaattcaaattgttgaacggtttggctatcagaagagctgcttacggtgtcgtcagatacgttatggaatctggtgctaagggttgtgaagttgttgtttccggtaaactaagagctgccagagctaaggctatgaaatttgctgacggtttcttgattcactctggtcaaccagtcaacgacttcattgacactgctactagacacgtcttgatgagacaaggtgttttgggtatcaaggttaagattatgagagacccagctaagagcagaactggtccaaaggctttgccagatgctgtcaccatcattgaaccaaaagaagaagaaccaattcttgctccatctgtcaaggactacagaccagctgaagaaactgaagctcaagctgaaccagttgaagcttagatttaattattaaatacataaataaactataagtacaataatttcttctattctagtgcacttaa

SEQ ID NO: 2649 - DNA, 2723 bp, Saccharomyces cerevisiae
ccatcgggaaaaacttccctgtaaagcattaacagagtcttccatccccgcttctgtcctttatttgtttcatagaagctattaagcatcatatactgcacacaggagcatgcatagtgtctgaagcctcttttgttctgtactgcacataatatttcatagaaaaactaacggaaagaatctacaactcatagtatctgtaaatccgtcctattgtcatatcacaatcacagactatgaccactcaagaatcgatcaaacctttggtagatagaatcctatcaaatcccctgcagttcaatgctgcaatgatctctaacaaatcgaataataatgatacttccgccgcgccggaaaatagctcgtatattgtgataggaaaacagcataataacaatagtaatagcacagctattgctgcaacggccgaatccaagcaaataaaagaaaataacttgatagacaggccaaacggaaagaaaaccaacactgttcctaaatctatggctgaagctttattgttgtatacttctaaaaatgataaagatgctgcagatgctactggtgccaagaagtcagcggagctttctacggagctttctacggagcctccttcctcttcttcggaagatgacaaagtaggaaaagaggaagaggaagagggtgaaatatttcatgaggcaagagactatgtagaaccccgaaaagctagtttgaaggaacgcgacaacgcagataagggcgatggtgaagacatcggcgaagacatcggtgaagacatcggtgaagacatcggtgaagacattggtgaagacattggtgaaaacttgggttctccattagcaaccattgatgattcatctaatgagaatgaaaaggaaaaaagaaaggaactgtctacaagcattagcagtgatgacgaaatagaagacgacgaggatgaggatgacatggattatgattctagtgctatggaaaaagagctccctgaagaagaggagaacgattccagctccaaaatttctgaaggcgaaaaaaagagtttatatcaagatttaatggaaaatagtacagtggaagtaaatcggtacgaaccagtaaacaacaccaaagaaaatggaaacaggaatccaaagggagaggaggaggaagaagaggaagaagatctgaaacataaatctaggtcaatcacccctccggttacaatatcaaatctatcaaacttttaccaattcaatgaaaatatcaatgatcgtggttctttaaactctactagaattgttaaaaattggggcgacaaattcaccaatttgaagcctcgtggccttttgaatcatggtgttacttgttacacaaatgctgctgtacaggctatgttacacattccttcgatacaacattatctttttgatatactaatggggaaatacgatagcaccatctcaaaaaattccgtttcctatactttagctgaaacaagtaaaaaaatgtggttaccggtctcaaaaaaccctagaaagaacgtttcagcttcctacattaatccaaaacatttgatttccagattggatgacattaattgtatgatgagcgaatggcagcaggaagattcacatgagtacttcatgtctctgatgtcaagattacaggaagattctgttcccaagggtcataaacttatagaatcgataatatatgacatattcggtggtcttttaaagcagatcgttacttgcaaatcttgtggcagtatatctaaaacagaacaaccattttacgatttatcgttgcacttgaaagggaagaaaaaacttgatccaaattctgacctgtcgagtgatagcattaacggcacttcagccaccacttctaccactacctccaatgctgccacaaaaccatctctttcatcctcttcatctgtcaatttaaacaatggctcaccatttgccgctgccagtgatttaagttcagccaaccgcagattttctattgaaaaatcaattaaagatttcttcaatcccgaattaatcaaggttgacaaggagcaaaagggttacgtttgtgagaagtgtcacaagaccacgaacgccgtgaagcatagttcaatattaagggctcctgaaactttacttgtgcatctgaaaaaattcagattcaatggcacgtcctcatcaaaaatgaagcaagctgtttcttatcctatgtttttagatttgacggaatattgtgagagtaaagagctacctgtcaaataccaactattaagcgtggtggttcatgagggccgctccctttcttcaggtcactacattgcccactgcaagcaaccagacggtagctgggccacttacgacgacgagtatattaatataatatctgaaagggacgttttaaaggaacccaacgcatattatctcctatacacgaggctaactccaaaatcggttccattgccattggcgaaatctgccatggccactggtaatgttacctctaaatccaaacaggaacaggctgttaacgaaccaaataaccgcccattgaagattaatagcaagaaaaataacagaaaaaaatggaaaaaaaataaaaaaaggaagttcaccaaatgaaaaaactcgatattcctggattttcctcttttcataggcatttttattagcatttcatttttattataccaaatcaatatatacatataaatatccggtctttattga

SEQ ID NO: 2650 - DNA, 1951 bp, Saccharomyces cerevisiae
gcattcactgacggaataaggaacaggaccaactataagcctccttttacactcacatcttcaggctttattttgttaagactgaaacatttcccacttaattgaagttacatcgttattttatagaacgatctttctattttgttttttgttcacttgatataccttcccttctacataacaaattaataaatatggataatggtacagattcttccacgagcaagttcgttcccgaatatagacgaacaaactttaagaataaaggcagattctctgcagatgaacttcgtcgtcgtagagatacacaacaggtcgaattaagaaaagcaaaaagagatgaagctttggccaaaagaagaaactttattcccccaactgatggcgctgattctgatgaagaagatgagagctccgtttctgcggaccaacaattttacagccagttgcagcaagaactaccacaaatgactcagcaacttaactctgatgatatgcaagagcaattgagtgctactgttaagtttagacaaattttgtctagagaacaccgccctccaattgatgtcgtcattcaagccggtgttgttccaagattagtagaatttatgcgtgaaaaccaacctgaaatgttacaattggaggctgcttgggctttgactaacattgcatcaggtacatctgctcaaacaaaagtggttgttgatgctgacgctgtacctcttttcattcaactattatataccggctccgttgaagttaaagaacaagccatttgggccttaggtaacgttgcaggtgattcaactgactacagagactacgttttacaatgtaatgccatggagccaattttgggtctttttaactccaataaaccatctttgatcaggaccgctacgtggactttatccaatttatgcaggggtaaaaaaccacaaccagattggtcagtggtctcacaagcgttgccaaccttagcgaaattaatctattcgatggacactgaaactttagttgatgcttgttgggctatctcttatctatctgacggaccacaagaagctattcaagcagtgatcgatgttagaattcctaaaagacttgttgaattactgagccatgaatcgactttagtccagactcctgctttaagagctgtaggtaatatagtcactggtaatgacttacagactcaggtcgttataaatgctggtgtcttacctgcgttaagacttctgctaagctctccaaaagaaaatatcaagaaagaagcgtgttggaccatttccaatattacggctggtaatactgaacaaattcaagcggtaattgacgcgaacttgattcctccattagttaaacttttggaagttgcagaatataaaactaaaaaagaagcttgttgggctatttccaatgcctcttcaggtggtttacaaagaccagatatcataagatatttagtatctcaagggtgtataaaaccattgtgtgatttgctagaaattgctgacaacagaataattgaagttaccttagatgctcttgaaaatattttaaagatgggtgaagctgacaaagaagctcgtggtttgaatatcaatgaaaatgccgattttatcgaaaaggctggtggtatggaaaagattttcaactgtcaacaaaatgaaaatgacaagatttatgaaaaagcatacaaaatcattgaaacctactttggtgaagaagaagacgccgtagacgaaactatggctccacaaaatgccggtaatactttcggctttggttctaatgtcaaccaacaattcaattttaactaactgaatgtgaagaaaaagatcaactaaataagtttattcagataaatcttcattatctgatccattatttttaagtttttcttttaatgtatataagaaattctaatcttttaattcgcacaatagta

SEQ ID NO: 2651 - DNA, 1428 bp, Saccharomyces cerevisiae
ttattttgttttgttatttagaaacagtctatctggtttaacttaaacgagtgagcttaagataatctgactacaagaaaaccaagcttctattactttgtttctttctcttttttcttttttgaataaagaattttcctttaaggagtaacttaagcatttagctgcacattaaacacttttttttttacttctaactcacacacttttggaagaacatttattttttcgaccttctttcccaaatacccagcgctttataattgaaatatgaagttctcttctgttactgctattactctagccaccgttgccaccgttgccactgctaagaagggtgaacatgatttcactaccactttaactttgtcatcggacggtagtttaactactaccacctctactcataccactcacaagtatggtaagttcaacaagacttccaagtccaagaccccaaaccacactggtactcacaagtacggtaagttcaacaagacctccaagtctaagaccccaaaccataccggtactcacaagtatggtaagttcaacaagacttccaagtccaagactccaaaccataccggtactcacaagtacggtaagttcaacaagacctccaaatccaagactccaaaccacactggtactcacaagtacggtaagttcaacaagacctccaagtctaagaccccaaaccataccggtactcacaagtatggtaagttcaacaaaaccaaacatgacactaccacttatggtcctggtgaaaaggcccgtaagaacaatgccgcccctggtccatctaatttcaactccataaaattgtttggtgttaccgctggtagtgctgccgtagccggtgccttattactattataataagctttgaattggatttgagaaataaaggaagacctaattttctccggttttatgttttttaccccccctacccccttcatcctgaagtagtaaattctttttattatactatttcgactactatgtgtttacgtgtgcttgtgcaaaagtgaaatttattgtgattgtgttctttttctcttttttttatacaaaaaatggagaaaggaaattgggacctacgatttaaagaagtgttatttcctatttcaacgagttaaatgaatgtgtgtgtttcgttgacttgtaaggatagagaaagatcatccaacttttaatcatggtttcctttccttttttatagcaatcgaatgtggaaggaaaatagagcggagcttgataattgtgtgtgtgaatgtcttgctttctctttttccttatttctacgctatacaaaaagtgtgcttttttcttctatttttttttctttaatgactttgtgtgtttattaccctttaattaattaccaaaaaaaaaataaactacgtttttaatttctaa

SEQ ID NO: 2652 - DNA, 1206 bp, Saccharomyces cerevisiae
gaagaaatttgaatgtatccaactaactattgaaaatcattcgtgatgtgcagattcttgattttcaaaggcaaacaaccgattcggctatctcatcttttaacaagaccagctcattctatcataaaccaatcatttgatagcagattacggctagacagaagaaggccaatgaatggtgatggttttggtgtcgcttactatccattggataccgagttaagcgaggacggtccatgccttttcaaagctattactcctgcatggaacaaccaaaatttgagtacattagcagaaaaaactaaatctgatctggtctttgcgcacgtaagagcctctacatatggtgtcctatctgagaccaattgccatccgtttacataccacagcttatgttttatgcataatggcggtatatctaatttcaaaggaatcaagagaaaattattgaatcatatcaaagacgaatacctgaattttattcaagggagcacagactccgagtgcgcatttgcattattcttagacactttagacaaattgggttacgacccaaagaagcaggacggcgatttcggtaatgttgcactaagaaaggcaatgttacgaacgattgactacatcagagattggactaaagaagcgaacaaggacgaggcacatgtggagccatctctcttaaattttgctgtaactgacggatccaccgttgtcgtttccaggtatataacttcaaagacggacgaggcagcatctttgcatttcagttgtggttccagctttgtagaaacttcaccaggagaatacagggtagaaaggttggatagaaaccaagatgtaattatggttgcatcggaacctttgactttcgagagaggtgattggactgcagtacccaccaacagcatattgaccattaagaaacagacaatattactacaccctattatcgatgagtactaccaagaagatccgttatacctaagaagttcaaccctcgcagaaagcaaggggctcatgggttctataccactagcaaaagccgtagaaaagaacgttcctccactagaaagagagggccgtacgagacctccaaccgctgtcgcacatatagcatgagcacacgctctagaggattgtaccattgtcactactagatatacatataaacaaataagaagcatcgacacataacaacaaccccaa

SEQ ID NO: 2653 - DNA, 3617 bp, Saccharomyces cerevisiae
ttgcagtactgcttgtttaaatacgcagtatacatttcttcttcttcttctctcttctttccttcctcgaagagtcactaaattaatactgggaagccaaaccaaaaaaactatacaatgagtgatcaaaataatcgatcgagaaatgaatatcactcaaaccggaagaatgaaccttcctatgaactccaaaatgcacatagcgggctatttcactcttctaatgaagaattaacaaacaggaaccaaagatataccaatcaaaatgccagcatgggttcattcactccagtccaatctttgcaatttccagaacaatctcagcaaacaaatatgctttataacggtgacgatggcaataataatactatcaatgataacgaacgagacatatatggaggttttgtcaaccaccatcgccagcgtcccccaccagcaactgcagaatacaatgacgtttttaatacgaatagtcaacagctaccgtcggaacatcaatacaataacgtaccttcatatccacttccttcgataaatgtgattcaaaccactccagaactcatacataacggctcacagactatggccacccccatcgaaaggcccttctttaacgaaaacgactactattataataacaggaactctaggacgtcaccgagtattgcttctagtagcgatggttatgcagatcaggaagctaggcccattttggagcaacccaacaataacatgaatagcggtaatattcctcaataccatgaccaaccttttggatacaacaatggttaccatggcctacaggcaaaagattactatgacgatccggagggtggttatattgatcagagaggagatgactatcagattaattcatatttgggtagaaacggtgaaatggttgatccttacgattatgaaaacagtttaagacatatgactcctatggagcgtagagaatatcttcatgatgatagcagacccgtaaacgatggaaaagaagaattagacagtgtgaaaagcggttactctcatagagacttgggggaatatgacaaggatgatttttcaagggatgacgagtacgatgatctcaacactattgataaattacagtttcaagctaatggtgtacctgcatcatcctcggtgtcttctatcggatctaaagaatccgacataatagtaagcaatgataacttaaccgcaaatagagcactaaagagaagcggtactgaaattaggaaattcaaactttggaatggtaattttgttttcgattctccaatcagtaagacgctattggaccaatacgctactacaacagaaaatgcaaacactttaccaaatgagtttaagtttatgagatatcaagcagttacttgcgaacctaatcaacttgcagagaagaatttcacggtgaggcagttgaagtatttaactccaagggaaacggaattgatgctagtagtcacaatgtataatgaagaccatatcctgttaggaagaactttgaaaggtattatggacaatgtcaaatatatggtgaaaaaaaaaaattcaagcacttgggggccggatgcatggaaaaagattgtcgtttgtatcatttcagatggtagatccaaaattaatgaacgctcgctagcattactaagttcgttaggttgttaccaggacgggtttgctaaggatgaaattaatgaaaaaaaagtggcaatgcatgtctacgaacatacgacaatgatcaacatcacaaatatttcggaatcagaggtttcattagaatgcaatcaaggtaccgttccaatacaacttttgttttgtttgaaagagcaaaatcagaaaaaaattaactcacatagatgggcatttgaaggctttgcagaattactgcgtcccaatatcgttacattgttagatgctggtaccatgccaggtaaagattctatttaccagttatggagagagttcaggaatccaaatgttggtggcgcatgtggtgaaataagaactgatttgggtaagagatttgtaaagcttttgaatcctttagttgcatcacagaatttcgaatacaaaatgtccaatattttagacaaaacaaccgagtctaactttggatttattactgttctaccgggggcattctctgcgtataggtttgaagctgtgagaggccaaccattacagaagtacttttatggtgaaattatggaaaatgaaggttttcattttttttcttccaatatgtatcttgctgaagatcgtattttatgctttgaagtggtcacaaaaaaaaattgtaattggattttgaaatactgcagaagttcttatgcttcaacagatgtaccggagagggtccctgaatttattcttcagaggaggcgttggttgaatggttcattttttgctagtgtatattccttttgtcatttttacagagtctggagcagtggtcataatattggtagaaaactccttttgacggttgaatttttttaccttttcttcaatacattgatttcatggttttcattgagttcatttttcctattctttagaattctcactgtttctattgcactggcataccattcagcatttaatgtgttgtccgtcatattcctgtggctttatgggatttgtaccttatcaacattcatactgtcattgggtaataaacctaaaagtactgagaaattttatgttctaacttgcgtcatttttgcggtgatgatgatttacatgatattctgcagtatattcatgagtgtcaaatccttccaaaatatattgaaaaacgataccatcagctttgagggtttgattaccacagaagctttcagggatattgttatctctctgggctccacttattgtttgtacctaatcagttcaattatctatttgcagccatggcatatgttgacaagttttattcagtatattttattgagtccttcttacatcaatgttttgaatatctatgcattttgtaatgtccacgacttatcatggggtacaaagggtgcaatggcaaatccgctgggtaagattaatactacagaagatggtacgttcaaaatggaagttctggtctctagttcagagattcaagcaaactacgataaatatttgaaagttttaaatgacttcgatccaaaatcagaatctcggcctactgagccatcttatgatgaaaaaaagactggctattatgcaaacgttagatctctcgtgattatcttttgggtcatcacaaatttcatcatcgttgctgttgtcttagaaaccggtgggattgcagattatattgctatgaaatccatatcaactgatgacactttagaaactgcaaagaaggcggaaattcccttaatgaccagtaaggcctcaatttattttaatgtaattttatggttagttgcattatcggcattaataaggttcattggttgctcaatatacatgatagtaaggttttttaaaaaggttacatttcgctaagtagattgattacccctttgttataaataagtatatgtgtttactatcatataataattaattagttgtaagtatggtatttttcaaagaaacatttagtatta

SEQ ID NO: 2654 - DNA, 1576 bp, Saccharomyces cerevisiae
tcagtaattagcttaaagtaagaactactcaataatattaaaccatttatccttggctcgtctttctattgaccaatcaatactattttaaacatctcttctaccacatactttcaatcagactagaatgaaattggatacttctcatatgagatatttgacaactgatgattttcgtgtcctccaggccgttgaacaaggttctagaagtcacgaagtcgttccaactcccttgattcatcaaatctcggggatgagatcgcagtccggaacaaaccgagccattagtgatttggccaagcttagccttatttccaaaatgagaaatgtcaaatatgatggttacaggctaacttataacggtattgattatttggctttgaaaaccatgttaaacagagacactgtctattctgtcggtaacactattggtgttggtaaggaatctgacatctataaagtaagtgacaaaaatggaaaccctagagtaatgaaaattcacagattaggtagaacctcttttcattccgtcagaaataatagagattatctgaagaaatccaaccagggggcaaactggatgcatctttcacgtttggcagccaataaagaatatcagtttatgtccatgctttattctaagggtttcaaggtccctgagccattcgataactcgcgtcatatagtcgttatggagcttatcgagggttacccaatgaggagattaagaaaacataagaatatacccaagctttatagtgatctgatgtgtttcatcgttgatctagcaaatagcggacttatccattgtgattttaatgagtttaatattatgataaaggacaaactagaggatgaaaacgattgtgggttcgtagttattgattttccacaatgtatatctattcaacaccaagacgccgactattatttccaaagggatgttgactgtattcgtcgtttcttcaaaaagaaactgaagtacgaaccaaaacctgattcatcaatgctcgacactgaaggtttcggcgatggttataaatatgcgtatccagatttcaaaagggacgttaaaagaaccgacaatttggatgaattggtgcaggcttccggatttagcaaaaagcatccaggagataggggcctggaaactgccgttgaaagcatgagaaatgctgtttataattcagatgacgatatgtctaatgacgaggccgaagaagaaaatggggagggcgattattcagaggaggatgaatactatgactccgaacttgataatgaaagttctgaagatgacagtgaagatgcacaagaagaggagaacgaacgtattatagaggcgctttccagtggtgttgaaaatctaaaaatggataaactaggaaactatatactagagtagtttagtttagacgactgcataaatggccgcaaataatcaagttgttatccataatttttttgatttttaagccatgttattcttcaggataaaaaaagtggtatttatgaactcttacatatgcgtattcatgctatattataatatcgaatctaagtcaatcgtattcta

SEQ ID NO: 2655 - DNA, 728 bp, Saccharomyces cerevisiae
tagatcacttaagacaatctaacaagtgtccaaaatgtctgcaaacgaattctactcaagtggccaacaaggtcaatataaccagcaaaacaaccaagaaagaactggtgctccaaacaacggtcaatatggtgccgacaatggtaaccccaacggtgaacgtggtttattttccactattgtaggtggcagtgccggtgcgtacgctggatctaaggtgtcgaacaaccattctaagttgagtggtgtgctgggcgccataggtggtgcattccttgccaacaagatatctgatgagcgtaaagagcataagcaacaagagcaatacggcaactcaaacttcggaggtgctcctcaaggtggacacaacaaccatcaccgtcaggacaataacaacaataacggtggatttggcggtccaggcggccctggcggtcaaggtttcggaagacaaggcccacaaggatttggaggtcctggtccacaagagtttggtggtccaggtggccaaggattcggtggtccaaatcctcaagaattcggcgggccaggtggccaaggattcggtggtccaaaccctcaggaattcgggggccaaggtcgtcaaggattcaatggcggttcacgttggtgaatggctcaacagagtgagtgtcatttttagctaactacatacttgatttatctatatatacatatatactactcgttttattatgatgtcgtaa

SEQ ID NO: 2656 - DNA, 1987 bp, Saccharomyces cerevisiae
caagaaccaatatcctcattaacaatggctgaaggtgttttccaaggtgctatcggtatcgatttaggtacaacatactcttgtgttgctacttatgaatcttccgttgaaattattgccaacgaacaaggtaacagagttactccatctttcgttgccttcaccccacaggaaagattgatcggtgatgctgccaagaaccaagctgctttgaacccaagaaacactgtttttgatgctaagcgtttgattggtagaagattcgacgacgagtctgtccaaaaggacatgaagacctggcctttcaaggttatcgacgtcgatggtaacccagtcattgaagtccaatacttggaagaaaccaagactttctccccacaagaaatttccgctatggtcttgaccaagatgaaggaaattgctgaagctaagattggtaagaaggttgaaaaggctgtcattactgtcccagcttactttaacgatgcccaaagacaagctaccaaggatgccggtgccatttctggtttgaacgttttgcgtatcatcaacgaacctactgccgctgctattgcttacggtctaggtgctggtaagtccgaaaaggaaagacatgttttgattttcgatttgggtggtggtactttcgatgtttccttgttgcacattgctggtggtgtttacactgttaaatctacttccggtaacactcacttgggtggtcaagatttcgacaccaacttgttggaacacttcaaggctgaattcaagaagaagactggtttggacatctccgacgatgccagagctttgagaagattgagaactgctgctgaaagagctaagagaaccttatcttctgtcactcaaactaccgttgaagttgactctttgtttgacggtgaagatttcgaatcctctttgactagagctagatttgaagacttgaacgccgcattgttcaagtctactttggaacctgttgaacaagttttgaaggatgctaagatctctaagtctcaaatcgacgaagttgtcttggttggtggttctaccagaattccaaaggtccaaaagttgttgtctgacttctttgacggtaagcaattggaaaaatctattaacccagatgaagctgttgcttacggtgctgctgttcaaggtgctatcttgactggccaatccacatctgacgaaaccaaggacttgttgttgttagatgttgctccattatctctaggtgttggtatgcaaggtgacattttcggtattgttgtcccaagaaacacaactgttccaaccatcaagagaagaaccttcacaactgtcagtgacaaccaaaccaccgttcaattcccagtctaccaaggtgaacgtgtcaactgtaaagaaaacactttgttgggtgaattcgacttgaagaacatcccaatgatgccagctggtgaaccagtcttggaagctatcttcgaagttgatgctaacggtatcttgaaggttactgccgtcgaaaagtctaccggtaagtcttctaacatcactatctccaacgctgtcggtagattgtcttctgaagaaattgaaaagatggttaaccaagccgaagagttcaaggctgctgatgaagcttttgctaagaagcacgaagctagacaaagactagaatcctacgtcgcttccatcgaacaaaccgtcactgacccagtcttgtcttctaaattgaagagaggttccaagtccaagatcgaagctgctttgtccgatgctttggctgctttgcaaatcgaagacccatccgctgatgagttgagaaaggcagaagttggtttgaagagagttgtcaccaaggccatgtcttctcgttaagatgtcattctggttaaggttatacacatatatatatttttcatttttaatgtcttagcttttgtatcttagatgaagttttagttctgtatatcacgatcaagatatcatacaatcataa

SEQ ID NO: 2657 - DNA, 2692 bp, Saccharomyces cerevisiae
cccaaaaggtagtaaacacaaaccgttgtatacgcaaccgccctacataagacactatttgcgtacagattatctcaatatgtctagtccagatgattttgaaactgcaccagcagaatatgttgatgcattggatccgagtatggtcgttgttgacagtggttctgctgcagtcacagcgccatcggattcagccgctgaggtaaaagctaatcaaaacgaagaaaacactggtgctactgctgctgaaactagtgagaaagtggatcagacggaggtcgaaaagaaagatgatgatgataccactgaagtcggtgtaacaactaccacgccttccattgctgatactgctgctaccgctaacattgcttcgacatcaggtgcatctgttactgaacctactactgatgacaccgctgctgatgagaaaaaggaacaagtaagtggtcctcctctgtcaaatatgaaattctatcttaatcgcgacgcggatgcgcatgactctttaaatgatattgatcaattagcgcgtctgattagagcaaacggtggtgaagtgctagactccaagccaagagaatcaaaagagaatgttttcatcgtgtcaccctataatcataccaatttaccaacggtaactccgacttatattaaggcatgttgtcaaagcaactcgctactgaacatggaaaattatttagtaccatacgataactttagagaagttgtcgatagtaggttgcaggaggaatcgcattctaatggtgtagataatagcaatagcaatagcgataacaaggattctatcaggcccaaaacagaaataatctctacgaatactaatggcgctacggaagactcaaccagcgaaaaagttatggtagacgctgaacaacaagctagattacaagagcaagctcagctccttcgtcaacatgtaagcagcaccgcatcaatcacaagcggagggcacaatgacttggtccagatcgaacaacctcaaaaagatacctccaataataataatagcaacgtcaacgacgaagacaatgatcttttgacacaggacaacaaccctcaaacagcagatgaggggaatgcatcttttcaagcacaaaggtccatgatttcgagaggcgctttgccctcccacaataaagcttcttttacagatgaggaagatgagtttattttggatgttgtgagaaaaaatccaaccaggcgtacaacacatactctttacgatgaaatatcccattatgtgcctaaccacacgggtaattctattaggcaccgatttagagtctatctttccaaaagactagagtacgtttatgaggttgacaagtttggtaaattggttagagacgacgatggaaatctgataaagactaaagttttgccaccatcaattaaaaggaaattttcagcagatgaagattacactttggcaatcgcggtcaagaagcagttttatcgtgatttgtttcaaatcgaccctgatactggaagatcacttatcacagatgaggatacacccactgctatagcgaggaggaatatgacaatggatccaaatcatgtgccagggagtgaacccaactttgcagcttacagaacccaaagccgtaggggaccgattgcacgagaatttttcaagcattttgccgaagagcatgcagcacatactgagaatgcttggagagataggtttaggaagtttcttctcgcttacggcattgatgattatattagttattatgaagctgaaaaagctcagaatagagagccggaaccgatgaagaacctcaccaatagacccaagaggcctggcgttcccactcctggcaattataactctgccgccaagagggcaagaaattatagttctcaaagaaatgttcagcctactgccaatgcagcgtccgctaatgctgctgccgctgctgctgccgctgcttccaactcttacgctataccagaaaacgaattactggacgaagataccatgaatttcatttccagtttaaagaatgatctatccaatatttcaaatagtttgccctttgagtatccacacgagattgcggaagctataagaagcgatttttcgaatgaagatatatatgataatattgatcctgataccataagctttccaccaaaaattgcaacaacagatcttttcctgccattgttctttcattttggcagtacgagacaatttatggataaacttcatgaagttatttcaggagattatgagccatcacaggctgaaaaactggtacaggatctttgcgatgaaactggtatacgtaaaaatttcagtacgagcatattgacgtgtttatccggggatctgatggtctttcctcgctatttcttgaacatgtttaaggacaatgttaatcctcctcccaacgttcctggtatttggacacatgatgacgacgaatcgctaaaaagcaatgatcaagaacaaataaggaaactggttaaaaagcatggaactggtagaatggaaatgaggaaaagattttttgagaaggacctgttatgagtaattgaattaagtaacatcattgtttaacttattttactcctttatttcactgattcacgttttctactttgtttttcagttcaatgtataatttatgtaaacttttacgtattttaattttcaaaa

SEQ ID NO: 2658 - DNA, 1115 bp, Saccharomyces cerevisiae
ccaggcttgaggagcatagatacgcaaaaatggaagataagcggaaaagacgagccgctacacttagtacagcattgatattatttgtggcatgctgcgtttatacactatatatattcaagtttgataaccctcggttgtctccaccagtttccttattgcctacaattagcaccttgaagaaaattgagcatgtaacagatttaaataaggagtacgtttttgttggtgacgttcatggtaactatgatgagttcatagaactcattgatgacaagattggaggactaggagaaaatataacaatgatattgctgggtgactttattcacaagggcccggactcagacaaggtcgtgtcgtatattctaaatcacaaggatcaagtcaagtgcgttttgggcaatcatgaaatattggtcatgatggcctatttaaacccagacttctcgaaatgggtaagacgccccaaattaatgacacctttaactttcagtacggagactaatttcataccacaagacatctctaaaatcagcaacgcacatggacggttagctcgcgaacttgggttttccaaattaagtcagctagcggaacattgttctatggccatagaactagatctggatattaccggtgatatactctttggtgcacatgcagggatggttccgggagacttcatgaagcccaaccaaattccgggcgtgagctctctgtcaaacatgaagtacgttgataagaagaactggtcaaaaacatcacgtgaaaaggaaaacaagaattatgtgagatggtacacactgtgggacaaatacggagaccactttagtaacgccaaagtattttacgggcacgatgcatccatgggactaaacctacggagacagaccaaaggtttggacacagcatgtataaagaacaatctgctttcatctatgaaagtgaagtacgatattaagaaggggcaatatgactatgaattaattcaagtacaatgctcttaaaacaaaaagtactacttaaaagcgcaacagattttatataatgtactatatgaaaaagatatgaatattattatgtaactcataatactgaatcttaaatttcaa

SEQ ID NO: 2659 - DNA, 1483 bp, Saccharomyces cerevisiae
agcttacctcgaccgagtaaatattaagcttttcgttggataaggtaggggaaatcgtaacattactaaatttaaagcatatcagaatggttaacgttgtattgggctcccaatggggtgatgagggtaaaggtaaactagttgatttactggttggtaaatatgatattgtagcccgttgcgccggtggtaacaatgccgggcataccattgttgtagacggtgttaagtatgatttccatatgttaccatctggtttagtcaacccaaactgccaaaaccttttgggtaatggtgttgttattcatgttccatcttttttcaaagagttggaaaccttggaagctaaaggtttgaagaacgcaaggagtagattatttgtttcttccagagcacatttagtctttgactttcatcaggtgactgacaagctaagagaattggagttatcaggtcgttctaaagatggtaaaaatatcggtactaccggtaaaggtattggtccaacttattccacaaaggcttctagatctggtttgagagttcatcatttggtgaatgatcaacccggtgcctgggaggaatttgttgctagatataagagattattggaaacgagaagacaaagatacggtgatttcgaatacgactttgaagccaagcttgctgaatacaagaagttaagagagcaactaaagccattcgtcgtcgattctgtcgttttcatgcacaatgctattgaagcaaagaaaaagatattggttgagggtgctaatgctttgatgttggatattgattttggtacttatccatatgtgacttcttccaatactggtattggtggtgtcctcaccggtttaggtattcctccacgtactattgatgaaatttatggtgttgttaaagcctacacaactagagttggtgaaggtcctttcccaacggaacaattgaacgaaaatggagaaaaactgcagaccattggtgctgaatttggtgtcactactggtcgtaagcgtcgttgcggttggttagacttggtagtcttgaaatactcaactttgatcaatggatacacgagtttgaacattaccaagttagacgtcctcgatactttcaaagaaatcccagtgggtatttcatattctattcaaggtaagaagctagatttgttccctgaagacttgaatattcttggtaaagttgaagttgaatacaaagttttgccaggttgggatcaagatattaccaaaattacaaagtatgaagatttgccggaaaacgcaaagaagtacttaaaatatattgaagattttgttggcgttcctgttgaatgggttggtaccggccccgcaagagaaagcatgttgcataaagaaattaaatagggcgttggacatccatgacaaacttcaatttaatttcttttcacagttttatagttttatatatacgaaatgtaactaatcatgacattttttaa

SEQ ID NO: 2660 - DNA, 698 bp, Saccharomyces cerevisiae
taagacaacggtggtataaactagtgtcgaagtccaaaatgcctagtcatcgcaattcaaacttgaagttttgcacagtttgtgcatcaaacaacaatcgttcaatggaatcgcataaagtcctgcaagaagcaggctataatgttagctcttacggaacaggttcagctgtgagactgcctggtctatcgatagataagcctaatgtgtactcatttggtacaccctataatgatatatataatgatcttttatcacaatcagcagaccgttacaagtcgaacggtttattgcaaatgctggatcgtaatagaagactcaaaaaagcacctgaaaaatggcaagaaagtacaaaagtcttcgacttcgttttcacttgtgaagagagatgttttgatgccgtttgtgaagatttgatgaatagaggtgggaaattaaacaaaatagtgcatgtaattaatgttgacattaaagatgatgatgaaaatgctaaaattggtagcaaagctatattggaattagctgatatgctcaatgataaaatagaacaatgtgaaaaagatgacattccctttgaagattgtataatggacattttaactgagtggcaaagctcacattctcaactaccgtcattatacgctccttcatattactaaacaaaacggtcaattactgtagaaaagcataagcattaa

SEQ ID NO: 2661 - DNA, 971 bp, Saccharomyces cerevisiae
atacctcaatctataagtgtattataatggcatgcaattttcagtttccagaaatagcttatccaggtaaactaatatgcccacagtacggtacggaaaataaagatggcgaagatataattttcaattatgtgcccggtcccggaactaaactaattcaatatgaacacaacggacgaactttagaagctataactgctacactagttgggacagtgaggtgtgaggaagaaaaaaaaactgatcaggaagaagagcgtgaaggcactgatcaatctacagaggaagaaaaatcagtagatgcatcacctaatgatgtcacaagaagaactgtaaaaaatattctggtttcagtgcttcctgggacagaaaagggtcgtaaaaccaacaaatatgctaataatgattttgccaataacctaccgaaggaaggtgatattgtgctgaccagggtgacaaggctttcgttgcaacgagccaatgtcgaaattttagctgtggaagataaaccatctccaattgatagtggcatcggcagtaatggatcgggaatagtcgctgctggtggcggttctggagcagctacgttctctgtttctcaagcatcatcagatttaggtgagacattcagaggtataatcaggtctcaggatgtacggtctacagacagagatcgtgtgaaagtgatagaatgtttcaagccgggagatattgttagggcgcaagttttatcattaggtgacggaaccaactactatttgaccactgcaaggaatgaccttggggtcgtgttcgccagagctgctaatggtgctggtggattgatgtatgctacagactggcaaatgatgacttcaccggttacaggcgctacagaaaagcgcaaatgtgccaaacctttttgatatgtaacagcttatctacagtgcatatagacgcgtatatatttaaaagagggtattcgcttcttc

SEQ ID NO: 2662 - DNA, 2823 bp, Saccharomyces cerevisiae
gctgaagagaacagtattgaaaccgaaacattttctaaaggcaaacaaggtactccatatttgctggacgtgttctttctctcgtttcatatgcataattctgtcataagcctgttctttttcctggcttaaacatcccgttttgtaaaagagaaatctattccacatatttcattcattcggctaccatactaaggataaactaatcccgttgttttttggcctcgtcacataattataaactactaacccattatcagatgaaagtgaggaaatatattactttatgcttttggtgggccttttcaacatccgctcttgtatcatcacaacaaattccattgaaggaccatacgtcacgacagtattttgctgtagaaagcaatgaaacattatcccgcttggaggaaatgcatccaaattggaaatatgaacatgatgttcgagggctaccaaaccattatgttttttcaaaagagttgctaaaattgggcaaaagatcatcattagaagagttacagggggataacaacgaccacatattatctgtccatgatttattcccgcgtaacgacctatttaagagactaccggtgcctgctccaccaatggactcaagcttgttaccggtaaaagaagctgaggataaactcagcataaatgatccgctttttgagaggcagtggcacttggtcaatccaagttttcctggcagtgatataaatgttcttgatctgtggtacaataatattacaggcgcaggggtcgtggctgccattgttgatgatggccttgactacgaaaatgaagacttgaaggataatttttgcgctgaaggttcttgggatttcaacgacaataccaatttacctaaaccaagattatctgatgactaccatggtacgagatgtgcaggtgaaatagctgccaaaaaaggtaacaatttttgcggtgtcggggtaggttacaacgctaaaatctcaggcataagaatcttatccggtgatatcactacggaagatgaagctgcgtccttgatttatggtctagacgtaaacgatatatattcatgctcatggggtcccgctgatgacggaagacatttacaaggccctagtgacctggtgaaaaaggctttagtaaaaggtgttactgagggaagagattccaaaggagcgatttacgtttttgccagtggaaatggtggaactcgtggtgataattgcaattacgacggctatactaattccatatattctattactattggggctattgatcacaaagatctacatcctccttattccgaaggttgttccgccgtcatggcagtcacgtattcttcaggttcaggcgaatatattcattcgagtgatatcaacggcagatgcagtaatagccacggtggaacgtctgcggctgctccattagctgccggtgtttacactttgttactagaagccaacccaaacctaacttggagagacgtacagtatttatcaatcttgtctgcggtagggttagaaaagaacgctgacggagattggagagatagcgccatggggaagaaatactctcatcgctatggctttggtaaaatcgatgcccataagttaattgaaatgtccaagacctgggagaatgttaacgcacaaacctggttttacctgccaacattgtatgtttcccagtccacaaactccacggaagagacattagaatccgtcataaccatatcagaaaaaagtcttcaagatgctaacttcaagagaattgagcacgtcacggtaactgtagatattgatacagaaattaggggaactacgactgtcgatttaatatcaccagcggggataatttcaaaccttggcgttgtaagaccaagagatgtttcatcagagggattcaaagactggacattcatgtctgtagcacattggggtgagaacggcgtaggtgattggaaaatcaaggttaagacaacagaaaatggacacaggattgacttccacagttggaggctgaagctctttggggaatccattgattcatctaaaacagaaactttcgtctttggaaacgataaagaggaggttgaaccagctgctacagaaagtaccgtatcacaatattctgccagttcaacttctatttccatcagcgctacttctacatcttctatctcaattggtgtggaaacgtcggccattccccaaacgactactgcgagtaccgatcctgattctgatccaaacactcctaaaaaactttcctctcctaggcaagccatgcattattttttaacaatatttttgattggcgccacatttttggtgttatacttcatgttttttatgaaatcaaggagaaggatcagaaggtcaagagcggaaacgtatgaattcgatatcattgatacagactctgagtacgattctactttggacaatggaacttccggaattactgagcccgaagaggttgaggacttcgattttgatttgtccgatgaagaccatcttgcaagtttgtcttcatcagaaaacggtgatgctgaacatacaattgatagtgtactaacaaacgaaaatccatttagtgaccctataaagcaaaagttcccaaatgacgccaacgcagaatctgcttccaataaattacaagaattacagcctgatgttcctccatcttccggacgatcgtgattcgatatgtacagaaagcttcaaattacaaaatagcatttttttcttatagattataatactctctcatacgtatacgtatatgtgtatatgatatataaacaaacattaatatcct

SEQ ID NO: 2663 - DNA, 1565 bp, Saccharomyces cerevisiae
cccttgctcttttgttacatgcttcctacttctgtttcccggtccttgtatctcaagacgtttagaagccaccttttacgagcaccacaaattgttttaaaaagaatgtcctcttccatcgatatcagtaagatcaactcttggaacaaagagtttcaatccgacttaacccatcaattggcaaccactgtccttaagaattataatgccgatgatgcactgttgaacaagactagactgcaaaagcaagataacagggttttcaacactgttgtctctactgattccactccagtcaccaaccaaaaaagctctggtagatgttggttgtttgccgctaccaatcaactgcgcttgaatgttctttctgaattgaacttaaaagaattcgaactgtcccaagcttacttgttcttttacgataagttggaaaaggccaactatttcttggaccaaatcgtctcctcggctgatcaagacatcgactcacgtctcgtgcaatacttgttagcagctccaacagaagacggtggccaatacagcatgtttttgaacctagtcaagaagtatggccttatccccaaagatttatacggggatctaccttattctactactgcgtccagaaaatggaattctctgttgactactaaactgagagaatttgccgagactctaagaacagctttgaaagagcgttctgccgatgattccataattgtcactctgagagagcaaatgcaaagagaaatcttcaggttgatgtcgttgttcatggacatacctccagtgcaaccaaacgagcaattcacttgggaatacgttgacaaagacaagaaaatccacactatcaaatcgactccgttagaatttgcctccaaatacgcaaaattggacccttccacgccagtctcattgatcaatgatccaagacacccatatggtaaattaattaagatcgatcgtttaggaaacgtccttggcggagatgccgtgatttacttaaatgttgacaatgaaacactatctaaattggttgttaagagattacaaaataacaaagctgtcttttttggatctcacactccaaagttcatggacaagaaaactggtgtcatggatattgaattgtggaactatcctgccatcggctataatttacctcagcaaaaggcatcgcgtattagataccatgaaagtttgatgactcatgctatgttgatcactggctgccacgtcgatgaaacgtctaaattaccacttcgctaccgcgttgaaaattcctggggtaaagactccggtaaagacggattatacgtgatgactcaaaagtacttcgaggagtactgctttcaaattgtggtcgatatcaatgaattgccaaaagagctggcttcaaaattcacctcaggtaaggaagagccgattgtcttgcccatctgggacccaatgggtgctttggccaaataaatagtttcagcagctctgatgtagatacacgtatctcgacatgttttatttttactatacatacataaaagaaataaaaaatgataacgtgtata

SEQ ID NO: 2664 - DNA, 3018 bp, Saccharomyces cerevisiae
agtaatacagccatagcagtagtagtgatagtactagcagctagaacaggatgtccagaatagattcagatctgcagaaagcgcttaaaaaggcgtgttccgttgaggagaccgcacctaagagaaagcacgtacgcgcatgcatagtgtacacatgggaccatcagtcttccaaagctgtttttacaacccttaagacgctgcctctggccaatgacgaagtgcaactgttcaagatgcttattgtactgcataagatcatacaagagggacatccgtcagcgctagctgaggccatccgggatagggactggatcagatctctgggtagggtacattctggcggttcgtcgtacagcaaactgattcgggagtatgtgcggtacctggttttgaagctggactttcatgcgcaccatagagggtttaacaacgggacgtttgagtacgaggagtatgtgtcactggtttcagtttccgacccggacgaagggtacgagacgatcttagatttgatgtcgttacaggattctcttgacgagttctcgcagatcatctttgcgtcgattcagtccgagaggagaaatactgagtgcaaaatttcggcgctgatcccgttgattgcggagtcatatggtatttataaattcatcacctcgatgctgagagctatgcacaggcaattgaatgatgcggagggtgacgctgctctgcagcccttgaaagaacggtacgagttgcaacatgcaaggctgtttgagttttacgcggactgctcttctgtgaagtacttgaccacgttagtaaccattccaaaactacccgtggacgctccagacgtatttttaatcaacgatgtggacgagtcaaaagagattaagttcaaaaaaagagagccctctgtaactccagcgcggacgccggcacggactccaacaccaacaccacctgttgttgctgagccggctatttccccacgtccggtatctcaaaggactacttcgacgcctacgggttacttgcaaactatgccgacgggtgccaccactgggatgatgatccccactgccactggtgcacgtaacgccatttttccacaggcgacggcacaaatgcagccggacttctgggccaatcaacaagcccagtttgcgaacgagcaaaaccgtctcgagcaagagcgtgtgcaacagttgcaacaacagcaggcacagcaggaactgtttcaacagcagttacaaaaagcacaacaggatatgatgaatatgcagcttcaacaacaaaaccaacatcaaaacgatttaattgccctcaccaatcaatatgaaaaggaccaggctttattgcagcaatatgaccaaagagtgcagcagctggaaagtgaaatcacaacgatggattctacagcttccaaacaattggctaataaggacgagcaactaactgcattgcaggatcaattggatgtttgggaaagaaaatatgagtctttagccaagctatactcccagttgcgtcaagagcatctaaatcttttacctcgttttaaaaaactgcagttaaaggtgaatagtgcgcaggaatccattcagaaaaaggaacagttagaacacaaattgaagcaaaaggatttgcaaatggccgagttggttaaggaccgtgacagggcaaggttagaattagaaagatccattaataatgcagaggcggacagtgcagcggcgacagcagcagcagaaacaatgactcaggataaaatgaaccctattctggatgccatattggaaagcggtatcaacaccatccaggaatcggtctataatctcgattctcctttgagttggtcgggtccgctgactccacccactttccttttgtccttattggaaagtacttctgaaaacgccactgagtttgccaccagtttcaataatttgatagtagacggccttgcacacggcgaccaaacagaggtcatacactgcgttagtgatttcagtacttcgatggctacactggtgaccaattcaaaggcgtacgccgttactacattacctcaagaacagtctgatcaaattttgaccctggtgaagagatgtgccagagaggcccaatatttcttcgaggatttgatgtctgaaaatcttaaccaggtcggtgatgaggagaaaactgatatcgtcatcaatgccaacgtggacatgcaagagaagttgcaagagctatctttggctatcgaaccgttattgaacatacaatctgtcaaatcaaataaagaaacgaacccacattctgaattggttgccactgctgacaaaattgtcaaatcctcagaacacttacgtgttgacgttcctaaaccattgttgtcattggcattaatgattattgatgctgttgtggctttggtaaaggctgctattcagtgccaaaatgaaattgccaccacgacaagtattcctctgaaccaattctacttgaaaaacagcagatggacagaaggtttgatctccgcggcaaaggctgtggcaggtgcaaccaatgttttaatcactactgctagtaagttaatcacttctgaagacaatgaaaacacatcacctgaacaatttatcgtcgcctccaaagaagtggccgcatccacaatacaattggtagcagcatcgagagtgaaaacttccatccactcgaaggcccaagataaattggaacactgttccaaagatgttaccgatgcatgcagaagtttgggtaaccacgtcatgggtatgattgaagatgatcattcgacttcgcaacagcagcaaccattggacttcacatccgaacacacattgaagactgccgaaatggaacagcaagtggaaattttgaagttagaacaatccttgagcaatgccaggaagagattgggcgagataagaaggcatgcctactataaccaggatgatgattgatcatgaattgtactttttatatataaagataaacgttaatataaatatatttatttgaaga

SEQ ID NO: 2665 - DNA, 1099 bp, Saccharomyces cerevisiae
aacatttcgaagcataacactgccaatgatgagtgaccaagaaaacgagaacgagcatgcaaaagcattcttaggattggctaaatgcgaagaagaagtggacgctattgaacgtgaggtagaattatacagattgaacaaaatgaagcctgtttatgaaaagagggacgcgtatattgacgaaattgcagagttctggaaaattgtgctttcacaacacgttagttttgcgaattacataagggcttcagattttaaatacattgacactatagataagatcaaagtagaatggctggcattggagtctgaaatgtacgacactagagattttagtataacattccatttccatggaattgagggagacttcaaagagcagcaagtcaccaaggtgttccaaatcaaaaaaggcaaagatgaccaagaagacgggatactgactagtgagcccgttccaattgagtggccccagagttacgactcgataaacccggacttgatcaaagacaaacgcagtccagagggtaaaaaaaagtacagacagggaatgaaaaccatatttggctggttcagatggaccggcctaaaacccgggaaggagttcccgcacggcgactcattggcgtcattgttcagtgaagagatctaccctttttgtgtgaagtactatgctgaggcccagagggacttggaagacgaagaaggagaatccgggttaagcgcagatggcgacagcgaggatgacgatggcagtctcggtgaggtggacttgccactatccgacgaggaaccaagctctaagaaaaggaaagtttagtagtctaggtccggagcgggcttggacaacggtttccctcgttgcgacattgctcttttttttgttgagtctggagttcttctttgttgtttagttaccttaaacttactcattggatcatctttaagcaattttgacttcttcttctgcgaacttatggatgttgcggcaccagaagcggaaatagtagtggccgcccttacaggcggtgttgcaggttggtttagtatagatgaatctagttttttcttacctaataaatagtcttccttttcgtca

SEQ ID NO: 2666 - DNA, 2433 bp, Saccharomyces cerevisiae
aagttcttattctatgcatgaatatcttcataaaagccctgagaagatatactataatgtctacgccgaagattgtgcagcccaaatggaaggttccaacgccacaagctaaagaaactgtgttgaagttgtacaacagtttaacaagatctaaggttgaattcattccgcaatctggcaatagaggtgtcacttggtactcttgcggtcctactgtttacgatgcctcccatatgggtcatgccagaaactatgtctctattgatatcaatagaagaattattcaagattattttggttacgacgtgcaatttgtgcaaaatgttactgatatcgacgataaaattattttgagagctagacaaaactatttatttgacaattttgtcaaagaaaatgataccaaattcaacgccactgttgttgacaaggtcaaaaccgcacttttccaatatatcaacaaaaattttactattcaaggcagcgagatcaaaactatcgaagaatttgaaacttggttatcgaatgctgatactgaaactttaaaattggagaatcctaaattccctatgcatgtcaccgcagttcaaaatgctattgaatcaatcactaagggcgattccatggacgcagaagttgcctttgaaaaagtcaaggacgttacggttcctctattggataaagaattgggctctaccattagcaatccagagattttccgccaacttccagcttactgggaacagaaattcaatgatgacatgttatcattaaacgtgctacctcccaccgttacaactcgtgtttctgagtacgttccagaaattattgactttgttcaaaaaattattgataatggttacgcatatgccacttccgacggttccgtgtactttgatactttaaaatttgacaaatccccaaatcatgactatgctaaatgccagccatggaataagggccagttagacttaattaatgatggtgaagggtccttaagcaactttgctgataacggaaaaaagtcgaataatgattttgctttatggaaggcttccaaggcaggtgaacctgagtgggaatcaccatggggtaagggtagaccaggatggcatattgaatgttctgtgatggccagtgatatcctaggctctaacatcgatattcattcaggtggcatcgatttggcctttcctcaccatgataacgaattggctcaatccgaggctcgcttcgacaatcaacagtggatcaactatttcttacatacgggccatttacatattgagggtcaaaaaatgtctaaatccttaaagaatttcattaccattcaagaagctttgaaaaaattctcaccgcgccaattaagattggcttttgcctcagtacaatggaacaatcaattggatttcaaggaatctttgatccatgaagtaaagtcatttgaaaactccatgaacaatttttttaagactattagagcattgaagaacgatgcagcttctgcaggtcatatctctaaaaagtttagtcccttagagaaagaattattggctgattttgttgaaagtgaatcgaaagtccattcggcgttctgtgataatttatccacacctgttgctttgaagacactgagcgaattagtgaccaagtcaaacacatacattaccactgcaggtgctgctttaaaaattgagcccttgattgctatctgtagctacatcaccaaaatcttaagaataattggatttccatcccgtcctgacaatttgggttgggcagcccaagctggctccaacgatggatccctaggctcattggaagacactgttatgccatatgttaagtgtttatccacatttagagatgatgtacgttccttagctatcaagaaagccgaacccaaggaattcttgcaattaacggataaaattagaaacgaagatttgctaaacttgaatgttgccttggatgataggaatggacaatctgccttgatcaaatttttgactaacgatgaaaaattggaaattgtcaagctaaacgaggagaaacatgccaacgaactagcaaagaaacaaaagaaattggaacagcagaaattaagagagcagaaggaaaacgagaggaagcagaaagctcaaattaaaccacaagatatgttcaaggatgtcacattgtacagtgcttgggacgagcaaggccttccaacaaaggacaaagacggtaatgatatcaccaagagtatgaccaagaagttgaagaagcaatgggaacaacaaaagaagctacatgaagagtactttggtgaagacaaatagaatactcgtggcttcgttatgtgtgcaactattcaaaagtacgtatatatgtatataccatctttttttacgttaaaatagtgaaaaaggaaaggaggaaagaaaaaactaa

SEQ ID NO: 2667 - DNA, 2620 bp, Saccharomyces cerevisiae
caaggttttttcctttagtaaatgcaaaattagtaaaagtgatagcgtcttctttgattaacaagtttcaatctttgcctttggctatgtcaaagctattttctactgtcaattctgcaagacatagtgtaccactaggcggcatgagagattatgtgcacattaagaaactagagatgaatacagttcttgggcctgattcctggaatcaattaatgcctcagaaatgtctactaagcttagatatgggtacagattttagtaaatctgcggctacggatgatttgaaatattctctaaattatgcagttatttctcgtgatttgacgaatttcgtcagcaaaaaaaagaattggggttctgtttctaatttggctaaatctgtgtctcaatttgttatggacaaatattctggtgtcgagtgtctgaatttagaagtgcaggcggatacaacgcatattagaagtgaccacatatcttgtattattcaacaagaaagagggaatccagaatcacaggaatttgacgttgttaggatatctgagttaaaaatgttgactttgattggtgttttcacctttgagagacttaagaaacagtatgtaactttggatataaagttgccttggccaaagaaagccgaattgccaccgccagtgcaaagcataattgataacgttgtcaagtttgtggaggaatcaaatttcaagactgtggaagctcttgtagaatctgtgtcagctgttattgcccataacgagtattttcaaaagtttccagattcgcctttggtggtgaaggttttgaaattaaacgcaatcacagccacagaaggtgttggtgtaagctgtattagagagcccagggagattgcgatggtaaatattccatatctttcctccatacatgaatcgtctgatattaagttccaattgtcttcatcacaaaacactcctattgagggtaaaaatacatggaaaagagcgtttttagcgtttggttcaaacattggggaccgtttcaaacacattcaaatggcgttgcaattattatcaagggaaaaaacggttaaattacggaatatttcgtctatttttgaaagtgaaccaatgtatttcaaagatcaaacccctttcatgaatgggtgtgttgaggtggagacattactgaccccaagcgaattattaaaattgtgtaaaaaaattgaatatgaagagttgcaaagagtcaagcattttgataatggtccgagaacaatagatctggatattgttatgtttttgaatagcgccggagaagatattatagtaaatgaaccggatttgaatataccgcatcctagaatgctggagaggactttcgttcttgagccgttatgtgaattaatatcccccgttcaccttcatcctgtgacagcggaacccattgtagaccatttaaaacagttatacgacaaacagcatgatgaagataccttatggaaattagttccattgccttatcgtagtggtgtggagcctagatttttgaaattcaagaccgctacaaaacttgacgaatttactggagaaacaaacagaattactgtttcacctacatatatcatggctatcttcaacgctacaccagattcattttccgatggaggtgagcattttgcggacattgaaagtcaattgaatgatatcattaaattgtgtaaagacgcattatatttgcatgagagcgtcatcatcgacgttggagggtgttctaccaggcctaactctattcaggcgtctgaggaagaagaaatacgcaggtctatcccattaattaaggccattagagaaagcactgagttaccgcaagataaagtcatactatccattgatacttatcgttccaatgtcgctaaagaagcgattaaagttggagtggatattattaatgatatttcgggaggtttatttgacagcaacatgtttgccgtaattgcagagaacccagaaatttgttatattttatcacacacacgtggtgatatttcaacgatgaataggctggcgcattacgaaaattttgcattgggtgattctattcagcaagaatttgttcataataccgacattcagcagctagacgacttgaaagacaaaacagtgttaatcaggaatgttggtcaagaaattggcgaaaggtatatcaaagcgattgataatggagtaaagcgctggcaaattctaatcgaccctggacttggttttgctaagacctggaagcaaaacttacaaattattagacatatccccattttaaagaactactcattcaccatgaactcaaacaattcgcaagtgtatgttaacctcagaaatatgcccgttttattgggtccatcgcgcaaaaaattcattggacatatcacaaaagatgtggatgcgaagcaaagagactttgctactggagcggtggtagcgtcgtgtattggtttcggcagcgacatggttagggtccatgacgttaaaaattgttcgaagagcattaaattagcagatgctatttataaaggtttggaataaaggttagttatatagattaaatatgtaattctgttttgtaataattttttttcctgttt

SEQ ID NO: 2668 - DNA, 1901 bp, Saccharomyces cerevisiae
caatggcctctttaccatgaaaaaaaaaaaaaaaaaaaaaaaaaggtaaggaaaaagagtattttcaattcgtttctgaacatataaatataaataaccgaaaaattagcccttgaacataattaacactcttctttgatatttaaatcacaagtacttttcttttattttcttcttaatacttttggaaataaaatgaatgtgaccactccggaagttgcttttagggaatatcaaaccaactgtctcgcatcgtatatttctgctgatccagacataactccttcaaatttaatcttgcaaggttatagtggaacaggaaaaacctacactttgaagaagtattttaatgcgaatccaaatttgcatgcagtatggctggaacctgttgagttggtttcttggaagcccttactgcaggcgatagcacgtactgtacaatataaattgaaaaccctatatccaaacattcccaccacagattacgatcctttacaggttgaagagccatttcttttggtaaagacgttgcacaatatttttgtccaatatgaatctttgcaagaaaagacttgcttgttcttgatattggatggtttcgatagtttacaagatttagacgccgcactgtttaacaaatatatcaaactaaatgaattacttccaaaagattctaaaattaatataaaattcatttacacgatgttagagacatcatttttgcaaagatattctacacattgcattccaactgttatgtttccgaggtataatgtggacgaagtttctactatattagtgatgtctagatgtggcgaactcatggaagattcttgtctacgtaagcgtatcattgaagagcagataacggactgtacagacgatcaatttcaaaatgtagctgcgaacttcattcacttaattgtgcaggcttttcattcttatactggaaacgacatattcgcattgaatgacttgatagacttcaaatggcccaagtatgtatctcgcattactaaggaaaacatatttgaaccactggctctttacaaaagtgccatcaaactatttttaagcacagatgataatttaagtgaaaatggacaaggtgaaagcgcgataaccacaaatcgtgatgaccttgagaacagtcaaacttacgacttatcaataatttcgaagtatctgctcatagcctcatatatttgttcatatctggaacctagatacgatgcgagtattttctctaggaaaacacgtatcatacaaggtagagctgcttatggacgaagaaagaagaaagaagttaaccctagatatttacagccttctttatttgctattgaaagacttttggctattttccaagctatattccctattcaaggtaaggcggagagtggttccctatctgcacttcgtgaggaatccttaatgaaagcgaatatcgaggtttttcaaaatttatccgaattgcatacattgaaattaatagctacaaccatgaacaagaatatcgactatttgagtcctaaagtcaggtggaaagtaaacgttccctgggaaattattaaagaaatatcagaatctgttcatttcaatatcagcgattacttcagcgatattcacgaatgattatctccctggaaggtatccagagggcaggatacgttcgaaacaacaactacgttatataaatatttatacatagtgggatagaatgaacaattatcaagtaaaccttgtattttttgttcccacgctctacgctctgtttcttggatatggtaatcaaagattaatacgtataaccgttattaattcagtccactagaaactattaaaagcgccctactgtatggaaaaacaatgaatgaggagactgaacggcgcaaaattgt

SEQ ID NO: 2669 - DNA, 2100 bp, Saccharomyces cerevisiae
attgcattgtctataacgataacaaaagacatcgtatatatatatatatatgggcaggtttagtaacataataacgtccaataaatgggacgagaaacaaaacaacattggcgaacagagcatgcaggaattaccagaagaccagatagaacatgagatggaagcaatagatccaagtaataagacgaccccatactctattgatgagaaacagtacaacacaaaaaagaagcatgggtcattgcaaggtggcgcaattgctgatgtaaattcgataactaattcgttaacaagattgcaagttgtctctcatgaaacagatattaacgaggatgaagaagaagcccactatgaggataaacacgtgaagagagccttgaagcaaagacacattggtatgattgcactaggtggtacaatcggtactggtcttttcgttggtatctccactcccttgagtaatgctggccctgtggggtccctgattgcttacattttcatgggcaccattgtctacttcgttacccagtcacttggtgagatggctacgtttatccccgtgacatcatctatcactgtcttttcgaagaggttcttatcacctgcattcggtgtttctaacggctacatgtactggttcaattgggctattacttatgctgtggaggtttctgtcattggccaagttattgaatactggacagataaagttccattagcggcctggattgcgatattctgggtaattattactttgatgaattttttccctgtcaaagtttatggtgaatttgagttctgggtggcctctgttaaagttttagccattatgggttacttgatatatgctttgattattgtctgcggtggatcccaccagggccctatcggtttcaggtactggagaaatccaggagcctgggggccaggcatcatctccagtgataaaagtgaaggccgttttctcggatgggtctcctccttgattaatgctgcatttacgtaccaaggtactgaactggttgggatcaccgctggtgaagcggctaacccaagaaagaccgttccaagagctatcaataaagtcgtctttagaatcgtactattctatattatgtctttgttctttattggtctactggttccatacaacgattcccgtttatctgctagttctgctgttattgcatcatcacccttcgttatttccattcaaaacgctggtacttatgctcttccagatattttcaacgccgtggtgttgattactgttgtatctgccgctaattcgaatgtttacgttggttcccgtgttctttactctttagctaggactggtaacgcaccaaagcaatttggatacgtcaccagacagggtgttccatatctcggtgttgtttgcactgctgcattgggtcttttggcattcctggttgtcaataacaatgcaaacactgcatttaactggttgatcaacatttccactttggctgggttatgcgcctggttattcatctctttggcacatattaggttcatgcaagctttaaagcaccgtggtatttctcgtgatgatctgcccttcaaggccaaattgatgccttatggtgcctactacgcagccttttttgtcaccgtcatcatattcatccaagggttccaagcgttctgtccgttcaaagtttctgagtttttcacatcttacatctccttgattcttttagccgttgtgttcattggttgccagatatactacaaatgcagatttatttggaagctagaagatattgacatcgattccgacagaagagaaatcgaagcaattatttgggaagacgacgagcctaagaatttatgggagaaattctgggctgctgttgcatagtcacagaacctcttgcatgccttcaaaatagaaaaaaataaaaaaatagacgtttcattaatcaaaatagcctgtagagattttgagggattgccccaaactttatgtataatatcaccacttattattcactattcatagtatgttacatcataaggccattgtcaccttcggccagcgatagtactcaaatctataataaattttccatatta

SEQ ID NO: 2670 - DNA, 654 bp, Saccharomyces cerevisiae
cggaaagttacaacacatttacgataaaatatggttgtcttgaatccaaataactggcattgggtggataaaaacaccttaccttggtctaaggactacttgaacggtaaattaacgagtttgtccactgtttcctctgatgggaagagcaaaattgagttaacccaggtgagtagcatcaccggtgactccaacgtatctcaaaggaagggcaagccgatttgctactttgacttacagttgtcgatgaacgtcaaagtgacaaatttggatactaataaggacgacgaggatgatgacggcatacttgcggacgggaaactagaaattccagagtttatgcatgacgagtctgatattccgattttgtcgcaagggtttgatgcttttgatggattggttaggtctgaatttgtccctaaagtagtggaaacgctactaaaataccaagatgacttgattaaagaacactcaaaggatatacaagtttgatgtgttcatgtaacgaaaaggggagcgttgcatagatagaccaccgccccttttaatttttccagcgttttcaattgttattcttcttcttcctcatactcacccaatacataacatgtatacacacatacatagataatgaagaaaatagcagtggtagaa

SEQ ID NO: 2671 - DNA, 588 bp, Saccharomyces cerevisiae
atgtccgggtcgttaaaatctctagacaagaaaatagctaaaagaaggcaggtgtataagcccgtgctagacaatccgttcacaaacgaagcacatatgtggccgcgcgtgcatgatcagccattgatttggcagctgctgcaatcctctatcataaataagttgattcacattcaatcgaaggagaactacccttgggagctgtatacagatttcaatgaaattgtgcagtatttgagcggcgctcacggaaacagcgacccagtatgtctatttgtgtgcaataaggaccctgatgtaccgcttgtgctcttgcagcaaatcccgctattatgctatatggcgcccatgacggttaaactggtgcagttgcccaagagtgccatggataccttcaagtcggtttctaaatatggaatgctgctgctgcggtgcgacgatagggtcgacaagaaattcgtatcgcagatccagaagaacgttgatctgcttcagtttccctggttaaatgctatcaagtatcggcccacatctgtcaagctgttgaaaactacagtgccaattgtctcgaagaagaggcaaaagtag

SEQ ID NO: 2672 - DNA, 3234 bp, Saccharomyces cerevisiae
caagggaggaattgtgtgtgctcattaccaacgtacttcttcagttattctgctaaacccgtttttttgttcttagcttcatccaggtgagcccgcaaacattacagaacgacgtataatacaaaataactaaacaaatacggataggacaaaagccaagaagcgatactaaatcacagagcgaatcaacatgtctgcacatacttacaaaaagtttgaaaactcgacctcgggcgatttacctgataaaatgaccatttatcaggattgtatgaacacgtttaacgaatcacctgtcaattccaagagatgtcgtttattgatttctcgcttgctgagactcttggcccagggcgaaaccttcccacagaatgaagcaactgcattatttttctctatctccaaattatttcaacaccagaacgatcctttaaggcaggctgtttatttggcaatcaaggaattgagtggcatttcggaggatgtgttgatggcaacctcttcaatcatgaaggacgttcaaaacggttccgatttgattaagcctgacgctattagatcgctgacttatgtcttggatgaatctactgctttttccgctgaaaggttattaaaaagtgccgtggtaagtagacatccttcaatatcctcagcagcattatgtacttcttatcatttgctgcccatttcagaagtcactatcagaagattcaccaatgaaactcaagaagctgttttggatttgaaacaatttccaaatcaacacggtaatagcgaatattatccaaactccacttatatttctcaatatcatgctcttgggttgctttatcaactgaagaaaactgataaaatggcgttactaaaattggttagacatttctctgaaaacaattctatgaaaaatcaattggccaaggtagaattggtcaagattgtcaacgatttgatttatagggatcctcaattatttagtcaattcaggccacttttgtctgattggctatccaacaagttcgaatctgttcagttggaaacggcgaaattgattacttctttcgctactcgcaattcccgcttagtggctcccgagttatatgcggcagctatcagtgctttacagtccttactgaccgttcctcgtgtttcttctagattcgctgcattgagaatcttaaatagaatatccatggtttcaccagaaaagattgttgtttgtaatcctgaactagaatctttaattaatgattctaatagaaacatttctacttatgcaatcaccactttattgaagacaggaacttccaaaaatatttcatctctgatttcgactattactaattttatccatgatgtcagtgatgactttaagatcattattattgacgccgttcgtacgttgtctttgaacttcccacaggaatggaagtcaattttgaacttcttaatcgatgttttgaaaaatagtgaaggtggattcaaatttaaaaacagtattgtcgaagcattaatcgatattgtttcatttgttccacagtctaaagaactcgccttagaaaacttgtgtgatttcatcgaggattgtgaattcaacgaaatactagtgagaatactacatcttttgggtaaagaaggtccatctgccccaaatccatcattatatgttagacatatttataacagagtggtgttggaaaattctattattagatctgctgccgttgtagctttatctaagtttgctttgacgaagaacgatcctaccttatatgagtcaatcataagtttgttaaagagaatcgctaatgataaagacgatgaagtcagagacagagccaccattgcactagaattcattgattcggctaggaataaagatgatgttatagcacaaaatctaatcgaatccaaatatttttacgatattccatcattagagtcaaaattaagttcttacatttcctcaaatactgattcatttgcaactgcatttgatgtgaatcaagttcgtaagtttactgaggatgaaatgaaggcaataaatctgaagagaaagcaagaacaaattttcaatcaaaagtctgaaaccactttggatactacaccagaggcagagagtgttccagaaaaaagagctgacgctaattcatttgctggtccaaacttggacgaccaccaagaagatctactagctactaagtacgctgacgaattgctatccattgaacaaattaaaccatttggtcaattagtaaatagttctagggctatctcattaactgagccagaagcagaattcgttgtacgtggtgtcaaacatctcttcaaagacaatgttgttttacaatttaatattacgaatactctgacggatattgccctagacaatgtttctgtagtctgtacccctgaaatttctgatgaagctgaattagaagagctattcaccctacaagtggacagattattaccatccgaggaagcagcttgttacgttgcattcaaaaaacttgatgaaattgtaatggaaggtttcttgaacaacttaacattcactacaaaagaaataaaccctgacactaatgagccatttgatggtgatgaaggtttccaagatgaatatgaaattgactcgattttcttgaatgctggtgattatgttaagagttctttcactggtaacttctccgctacatttgatgagttgccatgcgaagaagttgctgttttcaacattcaagaagatttatccatacaagaagtagtagataagattattttgaacagtagctgcttaccggtggaaagtacccaatttgctccaagtgattcaaactcccacaccttgaaattatttggtaagagtgctttaactggatctaaagtagccctacagattaagatgatcaagagttcgaaaggtcttgctttgaaagttcatggtaaaggtgaagacagcttattatgctctgatctggtgaatggtctaatgcagtaagctgtgaaattttatttcagttaatcccttcttttgttatcaatagtattaaaagaaatgcgtcagctttagcaagcgtgcatgcaaataagggaatgaacagcaagaacaataataaaccaaaaaaatcacggatagaatatgacggatcatcaccacacgaagaataaattatgtaatctttgtataaacaaaatttttaaagaaaaatactataatagtttgacaagagaaaa

SEQ ID NO: 2673 - DNA, 1402 bp, Saccharomyces cerevisiae
caagttagaaaccgttcatcttttaaaactcccaagttttgacaaatttgcgagtgtgtgtgtttctgctgatcttgacgagattaaactttgttcctgaagcaacaacgacagcaactgaacatcctctgaataagttaatatgttttccgctcaaaagccaatatatggcaatggagcaggcgtgaacatgggtggtggtggtccttcaactaataatccaggatctatgtccatgcctggggttccaacttcaatgggtccaggcatgaatcaacaaattccaagtggaggccccatgctaatgggcaatactccgaataataataatagcaatgaaaatggcgagaacaacggcaataacggcaataacggcggtaacgatgctaacgcaactcgaaacaatcccaacatggtcaataatagaggcgcagtgcatgctctagatgatcccaatgtataccactggatttgtcaattgacctacggccctcaaaaggaacaagcactgcttgaattaggtcgcaaaagagaacagtttgatgaccttgccgttgtgctttggtcttcctttggtgtaatgacctcattgctgaacgaaatcatttccgtatatcccatgctgcaacctcagatgctctctaacaatctatcaaatcgtgtatgcaacgctctagttcttctacagtgtgttgcatctcacccagagacaaaacatctctttttacaggcccatattcctctctttcttttccccttcctaaatactacctccaggcaaagaacttttgagtacttgagattgacttcattaggtgtgataggcgcattggtcaaaaatgactcacaagacgtaataacgtttttgctaagaaccgatatcgtgccgttatgcctaaggatcatggaatcttcttctgagctttccaagacagtcgccattttcattttacagaaaatcctactagatgacgttggattgcaatacatctgtgccaccttggaaaggttctacgccgtaactaatgtcttaaaagatatggttgagcacttgaccgtgagcacaccaccgggacgactactgaaacatatcattagatgctacttaagattaagcgacgatctcgaagcacgcaggctattgaaaatagtcttacctgccaaactgagagataacacttttacggaagtactaagagacgacgtcgggtccaagagatgtctggcacaattgctactgacattaaacgaagaaacctcatgatgcatccccatagatatattactgtttttctctttctattttcctgtattgttttaaccttgcctttttgttttagtttcacttcctcacctctcctaattttgtatagttatatttatatgcatgaaatgtataaag

SEQ ID NO: 2674 - DNA, 1069 bp, Saccharomyces cerevisiae
ggaattactattgcgtacatcagcaatcatccattgtcaagaacaaaaacgataacaaaaacaatcaattatacaaataacagtaaagtaataaaatgtgtgaatacagcaaggctcttcatattctgctcaagtcgccagtaacggatgacataataaaattcttaacagacacaacattgagggttgttccttcaagcaactaccccacgcctcccggttctccaggagagaaacacctcacaaggctgccatcgctaatgacttttatcactagattggtcagatacaccaacgtctacacacccactctgctcaccgctgcgtgctatttgaacaaattaaagcgtattctgcccagggacgctactggtctcccctcgaccatccatcgcattttcttggcctgtttgatactgagtgctaagtttcacaatgactcttctcctttaaacaagcactgggctaggtacaccgatggtctctttacactagaggatatcaaccttatggaaaggcagttgttacagctgttgaactgggacctcagggtgaacacagaagatttgatcctagatctgcagcctctattagagcccatcaagcaagacttggcaagatccagcgaccaaaggaagagaattaacatgatgatgtccatgaacagaaggacttgtgctggcacgagtcctatcagatcaaacaacagattcaaactctacgaaaaacagagaaacgtgtcgatagcatccgatttaagttctgctactctagtcgacagttgtaatgatctaagaaggctaaaagatgtaaccaacatagcgaacaacacagtcgctaacacgaattacgtcaggacggtagagaaatggaacgacaatgtcaacaggcaaagttgggatctggaacagatcatgagtcaacatgggttttaatgtggtaaacaagatggcccttacggggctcttagtgggagaaagatttttaatagagcataattaacggatacataatatattataaatttaaataatcaaggatacctaataataataacaatcaactgaac

SEQ ID NO: 2675 - DNA, 1336 bp, Saccharomyces cerevisiae
gaaaacaacacgtttacttgtagagttactattgcggtccgatggcagcgaaactatatcattattatattatgtatggcttctcaattttgatcttttttttttttggtcagtacgcgattttgaaagaaatggaaagaagctataaagagcacaggataaatatcttttcaaagcttgaataattttataaaaggtgtaggaacaggcccgacatacaagaatgtcgacaagtacagagaagaggagcaaagaaaaccttccatgggttgaaaaatacagacccgaaacgttggacgaagtgtacggacaaaatgaggtgatcaccacagttcgtaaatttgtagatgaaggtaaattgccacatcttctattctatgggcctccaggtaccggtaaaacttctacaattgttgctttggcacgtgagatatatggtaagaattactcgaacatggttttggagctgaatgcatccgatgacagaggtattgatgtggtgaggaatcaaattaaagactttgcctctacaagacaaatcttctctaaagggttcaagttaattatactggatgaagcagatgccatgaccaatgccgcacaaaatgcgttgagaagagttatagaacggtacaccaagaatacgcggttctgtgtattggccaattatgcgcataaacttacacctgcgttattgagtaggtgcacgagattcagatttcagcccttgccccaagaggccattgagcgtcggatagccaacgtcttggtgcatgagaagctgaagttgtctcctaatgcggagaaggccttaatagaactttctaatggggatatgagacgtgtgttaaacgttttgcagtcttgcaaagctactttagacaatcccgacgaggatgagatcagtgacgacgttatctatgaatgctgtggggcacccagaccaagtgacttaaaggcagtattgaagtcgatactggaggacgattggggtaccgcccactacacacttaataaggtacgcagtgccaagggtctcgcgttgatcgacctaatcgagggcatagtgaagatactggaagactacgaacttcaaaatgaggaaacaagagtgcatttgcttaccaaactggccgatatagagtactcgatatccaagggtggcaacgaccagattcagggcagcgcggtcattggcgccatcaaggccagcttcgagaacgaaactgttaaagccaacgtataatcgacgcaaatatgtatagatacaatatgtacagaacaactgcattgtgcaatataacaacataacacaacgcccagaacgaaataaaaa

SEQ ID NO: 2676 - DNA, 1213 bp, Saccharomyces cerevisiae
catgaatggaatatttgctattgagaagcctagcggtattacatccaatcagtttatgctaaagttgcaacatgctttaactaaaagtcaagtattctcgaaggaaattcaaagggcaacagcggaaagaaagcagcaatatgaaaaacagacaggtaagaaggccagcaagaggaaacttcgtaaagtctcaaaggtaaagatgggacacggaggcactttggatccgttggcctctggtgtcctggtaattgggattggagcgggcaccaaaaaacttgcaaattatctttcaggcaccgttaaagtctatgaaagtgaagccctgtttggtgtttccactacttcaggagatgtagaaggtgagattttgtcccagaactccgttaaacatttaaatttcgatgatttaaagactgtggaggaaaaatttgttggacaattaaagcagacgccgccaatatacgcagctttgaagatggatggcaaacccctgcatgaatatgctcgagaaggaaagcctttacctagagccattgagcccagacaagttactatttatgacttgaaggtgttttcagactctcttaaacgtgatcatgactatcccttattgaggcccactacagaagaagctgttgataccgtgaaaaatttgaatgcaaacatgctaaacgatgttttatacttttcaaaagaatatacagagaagcacggccttgattctgaggtggcaaaggtagaagaaccatttccgctgagtgaacaagaagagcaagaaatccaaaaagaaggagattcttatagggctccaaaattgcacttcaaagctaatgtgtcttctggaacatacataaggtccttagtgagcgacatcggtaaatctatgaggagctcatgttatatggtgaaattgatacgtttgcaacagcaggactggtctcttgaaaaaaataatgtgttccaattaacggattttactgaaagagacgagaaggtgtggagtaaggtactggagaaggttctagacgagggagcaactgttgatgttatagaagagctaaagaaagcagaaaaggaaataccagcggacgtgaaggaatgtatagtttcgagtgatcaacctggtgatgaggctacggctgaaacaattgaaactgctaacgccgaagaacattctaatacactaaaaagaaaaatcgaacaggtgtaa

SEQ ID NO: 2677 - DNA, 659 bp, Saccharomyces cerevisiae
catagaaaaccaactgcattccttccttatccctgccttcggctaattttaaaccaactttttaccttcctttaatatcaatatcaaaatacaatgaaattctctactctctccaccgttgctgccattgccgcatttgcttccgcagattccacctctgatggtgtcacttacgtagatgttaccaccaccccacaaagtactacatctatggtctccaccgtgaaaactacttccactccatacactacaagtaccattgccactctatccactaaatctatcagtagccaagctaacaccaccacccatgagatcagcacatacgtcggcgctgccgttaaaggctccgttgcgggtatgggtgccatcatgggtgctgctgcctttgctttgttataagttgcatggacaacttaaactaggaaggatattccgcttcatttcattaatttcacatttttttatctacatgatatgtattttccctcagttaccagattcgctagcttcgaagcaaggactccttggtcatacttaataaaggaacgtctgcttcattctcctaaagttcctttcgataaggacgcagaaggcaccttactagaccattgtataaactcataactacatactaattcaacgatatgttacattta

SEQ ID NO: 2678 - DNA, 766 bp, Saccharomyces cerevisiae
actgttatagttacgtgtgatgctgttacaacctgtttggaaaggctgccgatggacgcagtttgtcaggcctatcagaagatggaattctaccggcacgaatagaggagttcctttttcatttaaggatatttcaaatcaggaggatatcacgaatatctcgtatccttcgtcctctgactcagttttgacaaagtcaaatggtagtagtgaggtttacaagcccaaagaggaagtagttaagtacattctacatggcaagtttactaaaaataacacgcatttgacattttcaagcgttgtggaggacaagaactttcataagaataagggacttacgtataatgatacaatgctgtactatttgaacttaccccagaaagtgaagatttcgctatctacaggttgtttagggtttaggaaggcagcaagaggggagtatgaagctgcatttcaaaccagtggtagaatgtttgaattgattaaggaaaagaacatgctgaacaaagatatcgaagtggtgatggacgactttgggaagggcagagctgcttttatttccgctcttgttggtaaggaaggggccagtgtggtgaaaaaggttgtgaagatcagcgatgccaccaaattgaagtttggtggtgtaagatcaccaaagatgagaagactatgatcagctcccactatgtatgaattataaactatgtaaaagaagaagaaatatatatatattcgtgtaaataattcgatttttccctttttttaa

SEQ ID NO: 2679 - DNA, 928 bp, Saccharomyces cerevisiae
gctagtttaagcatatacataatggcaacctatcaaccatataacgaatattcatcagtaacgggcggtggctttgagaactctgagtcccgcccaggtagtggggagtcggaaactaacactagagttaacaccttgacacctgtgacgatcaaacaaattctagagtccaaacaggatattcaggacggccccttcgtttcgcataaccaagaacttcatcacgtttgttttgtaggtgtggtgagaaacattacagaccatactgcaaatatttttttaactattgaggatggaactggtcaaatagaagtgagaaaatggagcgaagatgcaaatgacttggctgccggtaacgatgactcttctggtaaaggttatggttcgcaagtcgcccaacaatttgaaattggcggttacgtaaaagtttttggtgctttgaaagagtttggtggtaagaaaaatatacagtatgcggtgattaagcccatagattcattcaatgaagtgttgacgcatcacttggaagtcatcaaatgtcattccatagccagtggaatgatgaaacaacctttggagagtgcatccaacaacaatgggcaatcattatttgtcaaggatgataacgatacatcttccggctccagtccgttacaaagaattctagaattttgtaagaagcaatgtgagggcaaagacgctaattcattcgctgttcccattccattgatctcgcaatccttgaatttggatgaaactaccgtcagaaactgctgtacgaccttgactgaccagggttttatctacccaacttttgatgacaataacttctttgccctatgaaaatatatagattatttttttagcatttcttagtattcgtttgtgtatttctactaggtaagtaccaaaatttgccggaaataga

SEQ ID NO: 2680 - DNA, 1019 bp, Saccharomyces cerevisiae
acacctgctcccttttttatttctccgtcaattgcactgtagaatccttttctggtctcatgttgtggaaagtttctaagatgttcttgggtggcttggtagcgctaacaacaatatcggttgcgaccctttatcactaccaaaatcgcctagtctacccatcatgggctcaaggcgccaggaatcatgttgacactcctgattcccgtggaatcccttatgaaaagctaaccctaattacacaagaccacattaaactcgaggcatgggatatcaagaatgaaaactcaacaagtactgtgttgatcttatgtcccaatgccggtaatattggatactttatactaataattgacattttctatcgtcagtttggaatgagtgtatttatttattcgtatcgtggttatggtaactcagaaggttcacccagcgaaaagggtttgaaattggacgctgattgtgtcatatcgcatttgtcaacggattctttccattcaaagagaaaactagtattgtatggtagatctctaggtggtgctaatgctctttacattgcttcaaaatttcgggatctatgcgatggcgttatactggagaatacatttttgagtattcgaaaagttatcccatatattttcccccttttgaaacgctttacgcttttatgtcacgaaatctggaattcagaaggccttatgggaagctgtagttcagagacgccattcttgtttttaagtggattaaaagatgaaatcgttccacccttccacatgaggaaactgtacgaaacatgtcctagttcgaacaaaaagattttcgaatttccacttggttcacacaatgatactattattcaagatgggtactgggatataataagagattttctaatagagaagggttttatctaaaagtaataatcaaaatatttgatagatttatttactttactgtatgtaaagaaaatgtggtcagtcctcacggccacttagttactgatggttatttattatgga

SEQ ID NO: 2681 - DNA, 2727 bp, Saccharomyces cerevisiae
atggccaaaaataaccacatttctgccagtggtaacagtacctctggagaccatcgtcttaaagaggaggttctgaccccaactacatctgcctcgactcctcatagaatatttagcgtggacgatgatccaaaggagatccaaaacgatatcaggtatcttgagggtctgcatgaagggttgaagttcgccctgcatgccaataaatccaagcgatctgtaagctcgcaatcaccaatcgtacatagcagcaacaacacgctgcaccaccacgagcaccaacaacacttgccgcccacactagagtcgctatcctccaagtcgcactctgtgccagacttaaatacagctactcccagctctccgaaacgaatgcattcatctatccgggaattacctcatgatgacaatgatgacgaggacgccaatgatgacagtcggttcattatacacgactcgcacggccatgatttacttatagacgagatcaattgccagtcgccttcacacttggaaaacaatgaccaggcgtctaatgcttcgtccacagagtcattcactttacgagaaagacaggacgccatcaacgagacccaccccttcggtatcaggatatggaagcctgctttatataagaaacaccgttcagttcaaagaaccgcggcgcaagacattcacgagactcagttgaagactattacctgggaggtgacttgttccaatgtgctatggtttattttgttcggtttccccattgcgatactcttctactcggcggctattgtggtatttttactaggcggcggaggactggtaacgaactctgcgaaggagtactccaagtgtctgtataaactcgccaattatttcctttggccttttggcaaaatggtatacttgttgcaggacgagcaatatttacaagaagataaggatgaaggtattagtatgcagcaattctacaattgggtgacttcatactccaacaggctggtcttccaccagtctcaggccaagtttcagcaaagagaggaccatccggcccctgcaacggaatcttcgtctttgatgccgcccgctaacacaacagcaacaccgcttaactcgaaccatccatcatataattctattagacacgaaattccgcacgcagcggctcaaagacggtactttgggagaggaaaatggagctggggtcgtgttcttttctatacaatcttccatctcgtcttgcaacccatccttgccgtcttatctctttgcctctggctcctggtgtttaccattcccatgagtaatgttctttggcaaattatgtatcattgcagaagacatccgcttgcattaggcttcaaatatgtcgagaactcctcccaatcgcacgaaaatgaaataacccagcagcaattgaacaaaaatatcctcttatgtacgttccgtgccgctggctggcattactacaagtacacagttgatggtacaaatgttattgttgtgaatttaatatccatcgttttctttacaatttttgacttttatgttttgaaaaatttcctgcattggaaaacgtggttcacatacgaatcctcaatattcattctttgtttgacatccaccatcccactagcattttacattggacaagcagtcgcatcgatctctgctcaaacttccatgggtgtcggtgctgtcattaatgcatttttctcgaccattgtggaaattttcttgtactgcgttgcattgcaacaaaaaaagggtcttctagtggaaggatccatgattggttccattctaggtgccgttctattattaccaggtctgtccatgtgcggtggtgctctaaataggaaaacacaaagatacaaccctgctagcgctggtgtctcttccgcattgttaatattttccatgattgtaatgtttgtccccaccgttttatacgagatatatggcggctactcggtaaactgtgcagacggtgctaacgaccgtgactgtactttctcgcatcctcccctgaagttcaaccgtttattcactcatgttattcaacctatgtccatatcttgtgccattgttctcttctgtgcttatatcattggcttgtggttcacccttagaacacatgcaaagatgatttggcaattgcctattgcggacccaacctcgaccgcaccagaacaacaggaacaaaattctcacgatgcacccaattggtcaagaagcaagtctacttgtattttacttatgtctacgctcctgtacgcaataattgcagaaatccttgtttcctgtgttgatgctgtcctagaagatattccctccttgaatccaaagtttctaggtctcaccatttttgctctgatccccaatacgacagagtttttgaatgccatttcatttgccatccatggtaatgtagcgttatcaatggaaatcggtagtgcttatgctttacaggtttgtcttttacaaatcccatccttagtcatttattccattttctatacgtggaatgttaaaaagtcgatgattaatatcagaacacagatgttcccattagtctttccccgttgggacatatttggtgctatgacgagtgttttcatgttcacctatttgtatgctgagggtaaaagtaactatttcaagggttccatgttgatattactatatatcattattgttgtaggattctacttccagggagctctttcggagtag

SEQ ID NO: 2682 - DNA, 1441 bp, Saccharomyces cerevisiae
aaacaattaagtgtccttttagaaatacgagagggtggtaaaatattgaagaatggtaaatttcgatttgggccaagttggtgaagtattccgtagaaaggacaaaggagctatagtgtccggagacaacccagaagaagaagaagacgtcgatgcttctgagtttgaagaggatgaagtaaagcctgtgcgtacaaagaacagaagacccaaagaggatgcattcactcaacaaagattagcggctataaacccggtgttaacgccgaggacagttttgcctctttatctgttaattgctgttgtatttgttattgtaggagggtgcatattagcacagaactccaaagtggatgaagtaaccatatattaccaggactgtatgactaacgcaacctcatcatggagcgacatcccttctgaacattggcaatttgtatttcacaaatataaaacatataatactgcaccacaatggaggtttgtggatgatgaatcagatgacttcacaaaacaaagaggtacatgccaaatcaggttcactactccaagtgatatgaaaaataacgtatatttgaattatgtgctggaaaaatttgctgccaatcacagaagatatgtactatcttttagcgaagatcagatacgtggggaggacgcctcttatgagacggtgcatgatgcaaccggtataaattgtaagccactatctaagaacgccgatggtaaaatatactatccatgtggcctaattgcgaactcaatgttcaacgacacgttccccctgcagttaacaaatgtaggggatacgtctaacaactattcattgacaaataaaggaatcaattgggaatctgataaaaaaaggtacaaaaaaaccaaatacaattatacacagatagcacctccaccatattgggaaaagatgtatccagatggatacaacgagacgaatattcctgatattcaggattgggaagagttccaaaactggatgaggccaggtgcttttgataaaattacaaaactgatcagaatcaataaaaacgatactttgccagcgggtgaataccagttggatatcggtctgcattggccagtattggagtttaatggtaagaagggaatctacttgactcacggttctcaccttggcggtagaaatccatttttaggtatagtttacctgattggaggctgtatttgtgctgccatggcattgatattattaacgttttggctcttcggcggtagaaagattgctgatgcatcaagtttgtcatggaatatgaaatagaaaaggagtgatggttttctttatttttaaccctgtaaaatttttttatttttttatttttactcttatatatgtatatgtttgtgtttatttctgaataaaaatttataagaaccaaattaaaaccgttaatagcccacccaa

SEQ ID NO: 2683 - DNA, 3278 bp, Saccharomyces cerevisiae
tcaacataaacaagcataatataaaacactacaatgaataaactattgttacatctagtacgagtcatttcgatactcggcctagcaaacgctctcacacaaacgcaaccgattttaaaagatattcaaataacagatagttataccaaaacaaaagaatgtacggatccagatcattggttcataatagaagggcaactgtctattccaaagggaagtcagcaaaatataacattccaagtaccagatgctttcagctcattccctcaagaacccttcagcataaaacataattctaacagtgttgccacgatatcacgcccagataaatcgacgaacaatttcaccatttctattccagaaaagagttcagaagatataactactacatttaacttccttgcacagcttacatcagatgctaaatccaaagttacagaaccaaaaagcatcgtttacagtttctattcagaaaatactatgtttaatgacgttattgattacgtcgctaaaaatacttctgctataacaacagatggtggtatatacaaaactaataataccgcctggtttaccgttgacttaccaatgagaacgttcagaaatcccgtttatttgacttctcagacatcttcctcctcagattacgtattcgatacttcgttaactaagtttgaggttgtcactgccgttgattcttttaacgaacctattaatgctatcccatatacaactgttcatgactactccacagaagatgaaattagatgtttatttaattctacaatcagcggtgggctatacttccgtgtgacttatttcacaaagaagctatctacctcgtccatatcaaatactgtcgaattaacatatcccgatgaaggtacatctgtcagacttttaggaaagagagatacttcaaccaccctagcctcagaattatattctgagtcagctgctaacattgattccaccaccagtgatgacacaactagctctgatgctgctataacaccaacatactcaaattcaacgctttcttcttatacttcgcaatcatccgctatccctgaagttgcggttactgcatcattgagtagcgggatcctttcttctacagttgacggtgctagcacctcggcggacgcttccatgtccgctgtctctacggtttcttctagcagtgaacaagcttcttcttcaagtatttctttatcggctccaagttcttcaaactcaacctttactactccttcatcttctctgtctgctactgaaacatatagtattatcagttcagctagtatatctgtcacacaggcttcctacattgataattctacaactaccgctgttacccaatctacttctactatagcagtttcatctgctgaaaaattgtcaagcactctatcatacaccagtaacgtcacaatatcagtatcatcagctacccaacatactactactccttcatatgttagtaactccactacactctcatcctcatctgttcttgaatctgtaattagctctccatacctggcaaacactactgtttcaggagcttcatctgcaagtcaatctactaatccgccatatgtctccaactccacaacatcatccgcaactcaattagccaccattgctccgttcgcgattaacataacaggaacaagtatttcttctagtatcactaatacttcttcagttagttctactacgtccagtttatcatccggcccatttgtttcaaacacagcggttgcctctgggtcttatattctaaccactactacagagtctgcacaacttactgaaatagggagtttgataccaatctcgactattactactagtaccaccacttctggtaccgataaaactggtagtaataaggtggcctcttcaactgaaatagcgcaatctatcgtaaacaacagttcactttcggtgtcaacaatcaacactaacgctgcgacagcagctgctaatgccagaaatgctactttcactcatgcaacccattctggttcgcttcaaccctcatatcatagcagctcactattatcgtccacaattgacaccaaggtaactactgctactacaagcaccagtagagacggtagttcgagtttggctttcaccactgggctcaatcaatccgtagttaccggtacagataaaagtgatacctatagtgtaatttcatccacagaatcagcccaggttacggagtacgacagcttacttccaatttccaccctgaagcctacagtcgttacaggtacaagtagaaacagtacctttagtatggtgtcctccaccaaattgaccgaagctactgcaacggataaaggtgatgcgtatagtgtaatttcatctacacagtcggctcaagttactgaatatggaagtatgcttccaatttctacgctggaaacaccaacagtcattatgagtaccgatgaaagcggctattttactttaactacatgtactgagtctgggcaagctacagaatatggtagtctgattccaatttccacactagatggttcagttatatatacatttactggcgaaagtgtagtggtgggttacagtaccacagtgggtgccgcccaatatgcacaacatacaagtttagtcccagtatctaccatcaagggttccaaaacttctctttcaaccgaggaaagcgtagtggctggctacagtactacagtgggtgccgcccaatatgcacaacatacaagtttagtcccggtatctaccattaagggttccaaaacttctctttcaaccgaggaaagcgtagtggctggctacagtaccacagtagattctgcccaatacgccgagcacacaaatttagttgccatagatacattgaaaactagcacattccaaaaagcaacagcaactgaggtttgtgtcacatgtaccgccctttcttcccctcattctgcaactttagatgcaggtactactatttcattgccaacaagttccagcacatctctatctacaataattacctggtattcctcatctactattaagcctccttcaatttctacatactcgggcgccgctggtcaattaaccatccgtattggcagtttgttgctagggttaatctcatttctgctgtaagaactattttatcaaatagaaagttataaataaaaactaagagttcttttggtataatgcataaataatttttttatataatgtttgtaattgtaatgataaatttttatcatcttgga

SEQ ID NO: 2684 - DNA, 1052 bp, Saccharomyces cerevisiae
gaggagaaggtttttgacaggtttgtgtaattggttatttgcttttatagattatatatacacaaacttaaaacactgttttctaagtaggctgcggagagggccaattgcagcagcgacgtacgcatagaggaaaaacaaccgttcatgtccattatgaagcagaggctaccactgggggagttttccagctcgaagatcaacaaactggcaattgccaatattgcagacgctagcgagcctagaaaccatggagaaaacaacgtcgggactgtgtgtcttccctctatcaagagtttgatggttagtcctgaagtatacgaaaacacgaagagtcttcctgttcccctaatgaggagcagtggcggaggtatggcttgtgccagtaagtcctcatgccaggatggtattagtacgaaaacaacgtctagagattactctgagctttccaagaagttgcaaattcgtttacagttcgcctattataaatacaagactaagcaaacagacaaaaatttcacagacttgaaatcaaagcatagcattacgaggccttccaaagtcgcgactcacagtaaatcagaacctttaactaggagaagaaaattagtactatctcagggtcattataaaacccctgctaggtctaagatcaaaactccatcttcgatttgctctcacgataatacatcttcctttacatctttccgcggtgtcagcgaaagctcgagcactaccgcagatatgaacgtcgcagataccaccacaccaatacgcaacaacataaacacaaagcattcaaacagtcataatcgcacattgtatcagagacaagaaacacctacaagcatcaaagccgctaagtctttaattcatctctttacaagtaaccaataatcccacccccaatatttctatctttcattttcattctccttcattgtgtatataataatattattgtcttcgtatatcttccacattaccttttcacttccgctttagttctgtacgtataattagatagaatatcatataaaacctgattttat

SEQ ID NO: 2685 - DNA, 1680 bp, Saccharomyces cerevisiae
taggccttggataacgtcttatttactatttatatgcgacatcttcgataatttcatacgtttaatttcgaactcgcatttattttatttattatgtcccatcgtatagcaccttccaaagaacgatcttcatcatttatttcaattttagacgatgaaacaagagacacattgaaagctaatgcagtcatggatggtgaagtagatgtcaaaaaaacaaaaggaaaaagctctcggtatatcccaccatggacaactccatatataataggtataggtggtgcttcaggttcaggcaagacaagcgttgctgctaagattgtgtcgtcaattaatgttccctggacagtattaatatctttggataacttttacaatccattaggcccagaggacagagccagagcctttaaaaatgaatacgatttcgacgagccaaatgccatcaacttagatttggcatataagtgcattttgaacttaaaggagggcaaaaggacaaatatcccagtttatagcttcgtccaccacaatagagttcctgataaaaatatagtcatatacggggccagtgtggtagttatcgaagggatctacgccctttacgatcgccgattgctggatttgatggacttgaaaatttatgttgacgctgatttggatgtctgcttagcaagaagattgtcgagagatatagtttccagagggagagatttggatggttgtattcaacaatgggagaaatttgtgaaaccaaatgcggtaaagtttgtgaaaccaacaatgaagaatgcagatgctatcattccatcgatgagtgataatgctacagcggtaaatttaatcattaaccacatcaagtcaaaactggaactaaaatcaaatgaacacttaagagagctaatcaaattgggctcttctccttcacaagatgtgcttaatcgtaacataattcatgaattgccgcccaccaaccaagttctttcgctgcatactatgcttctaaataaaaatctaaattgcgcggactttgttttctactttgacaggttagcaacaattttgttatcatgggcacttgatgacattcctgtagcacatacgaacataattacacctggtgagcataccatggaaaacgttattgcctgtcaattcgatcaagttacagctgttaatattattcgatctggcgattgttttatgaagtctttgagaaagacgatccccaatatcacaattggtaaattgttgattcagtccgattcacaaactggggaacctcaactgcattgcgaatttttacccccaaatatagaaaagtttggcaaggttttcttaatggaaggtcaaatcataagtggtgcggccatgatcatggccatccaggtgcttttagatcatggtattgatttggaaaagattagcgtggtggtttatttggccactgaagttggtatccgacgtatattaaatgcatttgataacaaagtcaacatttttgctggtatgatcatctccagagaaaagttacaaaatcatcaatacaaatgggcattgaccagattttttgattcaaagtattttggttgtgattgagaataattagaggcaatataaagtaaaattaaataatagtgcacgtatacatactatattagtaacctttcattctctcta

SEQ ID NO: 2686 - DNA, 1203 bp, Saccharomyces cerevisiae
acagagatcatggttacatatgctggaaaactggttctagctccaatggtaagagccggcgaactgcccacgagactgatggcgctggcccacggtgcagatctcgtctggtccccagaaatcatcgacaaaaagctaattcagtgcgtcaggaaggaaaacactgcactccaaactgtcgactacgtcgtgccgtccaaggttcaaacgaggccggagacgctcgttttcagaacatatccaaaactagaatcctctaaattgattttccagatcgggtctgcatccccggctctggccacccaggctgctttgaaagtgatcaacgacgtcagcgggatagatatcaatgcaggctgccccaaacacttctctatacactccggcatgggctctgccctcttgcgcaccccagacacactgtgtctcatcttgaaagaactggttaagaacgtgggtaaccctcacagcaaacccatcagtgtgaaaataagactcttggacaccaagcaagacactctacagctcgtcaaacgtctgtgtgccacgggcatcacaaatcttacagttcactgcaggaagactgaaatgagaaacagagagcagcccatcacagattacattgcggagatctacgagatatgccaggcaaataacgtgtcgttgattgtgaacggcgctatccgcgaccgctctcattttcatgatttacaagcgaatcattggaaaaacactaacattggtggtatgattgcagagtgtgctgaacgggaccctacagtttttgatcacacttctaagccttcagaagacggtccatcttgggtcgttgcttgtcgcgagtttattcagtgggcaacgaagtttgacaaccacatcggcaatacaaaatacatgttaagcagaattgtccccggaaaatcagtcttttttcagtactttgcccgttgcaagagcccggaagaagttagtttcgtactaaagcaattgaacgatgatggaagcgctcaaacagatccttcagagtacttggaaaactgcagagctcaagaaaaagctttgaaaaacgccaacgccatcgccaagcaaaagaggaaacagaccgatcacataggcagtgacactaaaaagcaaaaggttgtaccccttcccacagatatataatatattctaagtaaaaagaacggattatgaaagaaaacg

SEQ ID NO: 2687 - DNA, 1018 bp, Saccharomyces cerevisiae
agggaaacatttgttgcgtttaattaatagaaataataggttattgcattcgccctccattgcagaaaaaaaaaaaaaaaagaccattttcctcttctactctctttgcctgtacatactacacgttatagcgttaacaaaagcagatagaaaaaaaaaaaataaccaagataatataggtatacttgtttaacagatcacacacaatcatgtcgtggctttttggagataagacacctaccgatgatgcgaatgctgccgtgggcggccaagatacaaccaagcctaaggaactatcgttgaagcagagtttaggtttcgagccaaacatcaataacataatatcaggtcctggtggaatgcatgtcgacaccgctaggctgcatcctttggctggtctagacaagggtgtggagtatttagatctggaagaagaacaactatcctcgttagaaggctcacagggtctgatcccttcccgtgggtggaccgatgacctatgttacggtaccggtgccgtctacctgctgggacttggtatcggagggttttctggtatgatgcagggtctgcagaatattccgcccaatagtcccggaaaattgcaattgaacaccgtcctgaatcacattactaagagaggtcccttcttaggtaataatgcggggattctcgcgttgagctacaatatcatcaattctacaatagatgcactaagaggcaaacatgacaccgcgggctccattggcgctggggccctcacgggcgctttgttcaagtcttcaaaaggtttgaaacccatgggttattcctcggcaatggtggccgctgcgtgcgccgtctggtgtagtgtcaagaaaagactacttgaaaaatgagcaacacaagaacctactctctctctctctttctctctctctctccctcttcgcttttcccccatgcactgatggcgcttgtatatagcatttgaaaaataatagtacgtaacgcagaaaacaaaccaatgaaagtagaa

SEQ ID NO: 2688 - DNA, 843 bp, Saccharomyces cerevisiae
gaaaaaactcttgacaagtgcaccgatactcaccaacatcgcacaatgaagattttaacccaagacgaaattgaagctcatcgctcacatacgctaaaaggtggtattgaaggtgcccttgccggatttgcaatctctgctataattttcaaagtcctaccaagaaggtacccaaaattcaagccttcgactctaacatggtccataaaaaccgccctttggatcacccctcccacggtcttgactgctatatgtgcggaggaggcctcgaacaatttcgacgctacaatgtacggatccggttcctcctcggaagacgcactagatgagcacagaagatggaagagtttgagtacaaaggacaagtttgtcgaaggtctatctaataacaagtataagatcatcaccggtgcctgggccgcttcgctgtatgggtcgtgggtaatcgtgaacaaagaccccatcatgaccaaagctcagaagatcgtgcaggcaagaatgtacgctcaattcattaccgtcgggctgctgctggcctccgttggtttgagcatgtacgagaataagttacatcctaacaaacaaaaggtcaacgaaatgcgccgctgggaaaacgcactgagggtcgccgaagaggaagagagactcgagaaagagggaagaaggaccggctacgtttctaacgaagaaagaataaactccaagatcttcaagtcgtaaacctcgtcggtttatctgcctcaactttatttccgctcctcgtcttttataaaattcctttcatcaatacatctatatattcgaatatatagataaaccaatacaaaaacatactgaaatttt

SEQ ID NO: 2689 - DNA, 2046 bp, Saccharomyces cerevisiae
aaaagcaacaataacaaacacaaccatggacaagaagaaggatctactggagaacgaacaatttctccgcatccaaaagctcaacgctgccgatgcgggcaaaagacaatctataacagtggacgacgagggcgaactatatgggttagacacctccggcaactcaccagccaatgaacacacagctaccacaattacacagaatcacagcgtggtggcctcaaacggagacgtcgcattcatcccaggaactgctaccgaaggcaatacagagattgtaactgaagaagtgattgagaccgatgataacatgttcaagacccatgtgaagactttaagctccaaagagaaggcacggtataggcaagggtcctctaactttatatcgtatttcgatgatatgtcatttgaacacaggcccagtatattagatgggtcagttaacgagcccttcaagaccaaattcgtgggacctactttagaaaaggagatcagaagaagggagaaagagctaatggccatgcgcaaaaatttacaccaccgcaagtcctccccagatgctgtcgactcagtagggaaaaatgatggcgccgccccaactactgttccaactgccgccacctcagaaacggtggtcaccgttgaaaccaccataatttcatccaatttctccgggttgtacgtggcgttttggatggctattgcatttggtgctgtcaaggctttaatagactattattaccagcataatggtagcttcaaggattcggagatcttgaaatttatgactacgaatttgttcactgtggcatccgtagatcttttgatgtatttgagcacttattttgtcgttggaatacaatacttatgcaagtggggggtcttgaaatggggcactaccggctggatcttcacctcaatttacgagtttttgtttgttatcttctacatgtatttaacagaaaacatcctaaaactacactggctgtccaagatcttcctttttttgcattctttagttttattgatgaaaatgcattctttcgccttctacaatggctatctatggggtataaaggaagaactacaattttccaaaagcgctcttgccaaatacaaggattctataaatgatccaaaagttattggtgctcttgagaaaagctgtgagttttgtagttttgaattgagctctcagtctttaagcgaccaaactcaaaaattccccaacaatatcagtgcaaaaagctttttttggttcaccatgtttccaaccctaatttaccaaattgaatatccaagaactaaggaaatcagatggagctacgtattagaaaagatctgcgccatcttcggtaccattttcttaatgatgatagatgctcaaatcttgatgtatcctgtagcaatgagagcattggctgtgcgcaattctgaatggactggtatattggatagattattgaaatgggttggattgctcgttgatatcgtcccagggtttatcgtgatgtacatcttggacttctatttgatttgggatgccattttgaactgtgtggctgaattgacaagatttggcgacagatatttctacggtgactggtggaattgtgttagttgggcagacttcagtagaatttggaacatcccagtgcataagtttttgttaagacatgtttaccatagttcaatgagttcattcaaattgaacaagagtcaagcaactttgatgacctttttcttaagttccgtcgttcatgaattagcaatgtacgttatcttcaagaaattgaggttttacttgttcttcttccaaatgctgcaaatgccattagtagctttaacaaatactaaattcatgaggaacagaaccataatcggaaatgttattttctggctcggtatctgcatgggaccaagtgtcatgtgtacgttgtacttgacattctaaggcatcctgcaactgttctgtggagctattaaatctttatagtaaatttttttttacttttttttttttttttttttttttttattatttac

SEQ ID NO: 2690 - DNA, 1422 bp, Saccharomyces cerevisiae
acccttttccatttcattaacatgtctagttcaatatttggcccacttacgggttttttggagcgtgtcaattcactcaatgcgccctaccaagcattatcatatgacgaacaaaaggccatgactatttggcaaagagtcaaattctacaactggacttttgaattgtgtgctctaggtgtgttgttcttggtttatgctttctacaaatttggtaactccgttaatttgaagcgcggaaatcagattttccaatctttgcattcatttttggccaacgacttaaagttctcccgtgtagggttcaatatcaatgattccaaaatctttacagtggaacaccaaaatacatggttctcttcttttgctaccggtagatccgccatcaagagcatcaacctaaaccttcatctggtagcccgtagcaaccctttctctatgtgtctagagtacctgcttggatttttttttgcaagtttgaaaagtaagcaattggaagaatttatggagatcgtgatcaggccaaatggtattttagttactagtgaatctgctcatcctaacaagaatgcgcatgaaattttgaccaaatttagatttgtcacttctattgttaacaaagaattcatgaatcaagctagaactgaaaactatttcctgtctattgcacacactagtgaaaacgataaactaccaaataacttcgtctacatgtccgatgttaatcaattatcagggttcatgtttcattactccaagccctatgaggttttgtcccaagctggtaatcttttgaaatatataagtttcaccgatttgcctgtcaacccgccacgcgatgataaagaatgggaatcttcaattgaaccaaaggctatcattcgttgcgctgttccccaaaatgagaatgaattgaagttgttaaaccaaattatttccttagtcgtagaaatctacgatgggttcactcaagatttagtccaacagtctccaaacttattcattaccaacgacatcttgaaaagaactaccaacttgcgtcagcaagaactgaacaagatcaaaaagtttatgaaagaaactgaattggaattggcaaaggagaagaaattagaattggaaaaagccaaaagacgtcaattgaaggcctctggtcaacaagaaaaggtagatcaaaaaatgaaagagaaaagagaaagacgtctcaaaaacaagcaaagaacaagatttcagtaagaaccactttgttcttctttcctccttataattttctgaacctcttcagtttttgtatacgaacgttttccatgtatccatacatttaaatagtaagtatgtaaattggtatgtggtgttttgaattgcgatgttgcctatatacaagattgtacgctatctgaatacatactctttaccaatcaa

SEQ ID NO: 2691 - DNA, 1235 bp, Saccharomyces cerevisiae
ggttgaatacatgcctgtgtgagggtggtgccaatgaccagtacattacatacgacaaaaaaagtgctctccattcaatcacacgtcatacatggctacgtgggaaacaaggccgctacgttcccacttcaatacagaggttgggatgtggacgtattgaacacagttcagttttctaaccactcggggtacgcccacttcacaggcttcaaatgcagcactgaggagttggtagacattgtagagaagggcttgattgggtctcttagaatcaagtatgatgccgtacttagtggctatttacccaatgttcaagccctgcaaaaggtagcaggaatagtgggtcaattatgtgaggggagtgaaaacgtcaagtggatattagatcctgtactgggcgataatggaaggctgtacgtggatcgagaatgtgttgcggtataccaagacattttacaaaacttcaaaatttttttggccacaccaaatcagtttgaaatggaactgttggtggggatgtcaattcgtaccttagacgacgctaagcaggcatttaaactatttcataaaaagtaccctcgagtaagccgaatagttgtcactagtctggaattatctgaattcctgagcaacgacacttacgtagtagcagggtttgattgctcggccagtgaagagatattcttctatgaaatccccaagatcaacgcaaaatttagtggaagtggtgatttaatcagcgccatgctcactgactcgttactaggcgaccgccgctgcacacagctgtcattaagcgcatccttgggccaagtgctgtggctcgtcaccagtatcctacaaaaaacgtatgatttaaacatagctgagcggggcccacaagattccacgatagatatcaaggatttaaagctgattcagtgtagagacatcctaaagcaagatctcataccctccattggcaagccaaaaaccattaaaatatgattcttacgaaacggtatgctccttcctcattggggtgcggctgctgcaggaacctgcctaaataggaaaatacattcctgatttggaaactgtaggcacacgacgcgtccctttggagaagatcgatccttctttgggtctttcaatttgattggaaaaaaaatatttaaaaaaatagaagaaaaatatagaatatatagaatatatagaatcaactactgcagtagataaataaagaagactattca

SEQ ID NO: 2692 - DNA, 1019 bp, Saccharomyces cerevisiae
atgaagagcttttttctttatctttatgtggcattcatgtttagttgcataacggctctgccattacctgtggataacaaaagggcttcttcagactccttagacctaaagaaaaaatacgcaccagaccctcctattacacataatgtaaacatcggaattgttttcacagatcctgaaagttcggaagaagccggccgtctcataacaatagacttatacgggactatggtgcccaagacagtaatgactttttgccagtatgttgatagtgtaaaagatcgccttgcttcccgtcacagttactcgccagaacgcgattttgataaaattctaccgaatggagctatagaaggtagctccgtttcttcctcctctattgaagaaacggaaatgttggctccaaaactcccggaagaaaatcatagtttaattcatgataggccaggcagagtttccatgattaaggacgataagggtcttaagtttataattgagaccagtgagacgccacttgaaggtgaaagtgttgtgtttggccaagttaccgccgggttaaaagatctgatggataaactagctaatgtgaaaactgacgaaaatggcaaaccagagcaaccaataacaataggttacatttcatcccaggaacacaggattcagcatgcaaaggaagctcacgaaaagtatttacaaaggcttcaagattaccaaaacggcgatttggagaaaggtattacattgaagaattatttataccagggtagtcaaagaaagttagaagacgcaaaatataatcagcttcaccatcctttaccaaagattatgcttggtatttcggtattgttacttttctacgttttggccaagtacaggaaaagaatattcaacagatcgtctaaaatagtttctattagagaggattaaaatgtttcgatccatccgcttaatattcattcattttgtatcacatacatacgtataaatatacataacttacctcgtctttattatgccaa

SEQ ID NO: 2693 - DNA, 1875 bp, Saccharomyces cerevisiae
agtgaaaccattaacgattagtgttgttaaaagagttgaataaagccattaaacaacgattcagttgacaatgcgttggtctgtccttgatacagtgctattgaccgtgatttcctttcatctaatccaagctccattcaccaaggtggaagagagttttaatattcaagccattcatgatattttaacctacagcgtatttgatatctcccaatatgaccacttgaaatttcctggagtagtccctagaacattcgttggtgctgtgattattgcaatgctttcgagaccttatctttacttgagttctttgatccaaacttccaggcctacgtctatagatgttcaattggtcgttagggggattgttggcctcaccaatgggctttcttttatctatttaaagaattgtttgcaagatatgtttgatgaaatcactgaaaagaaaaaggaagaaaatgaagacaaggatatatacatttacgatagcgctggtacatggtttcttttatttttaattggcagtttccacctcatgttctacagcactaggactctgcctaattttgtcatgactctgcctctaaccaacgtcgcattggggtgggttttattgggtcgttataatgcagctatattcctatctgcgctcgtggcaattgtatttagactggaagtgtcagctctcagtgctggtattgctctatttagcgtcatcttcaagaagatttctttattcgatgctatcaaattcggtatctttggcttgggacttggttccgccatcagtatcaccgttgattcatatttctggcaagaatggtgtctacctgaggtagatggtttcttgttcaacgtggttgcgggttacgcttccaagtggggtgtggagccagttactgcttatttcacgcattacttgagaatgatgtttatgccaccaactgttttactattgaattacttcggctataaattagcacctgcaaaattaaaaattgtctcactagcatctcttttccacattatcgtcttatcctttcaacctcacaaagaatggagattcatcatctacgctgttccatctatcatgttgctaggtgccacaggagcagcacatctatgggagaatatgaaagtaaaaaagattaccaatgttttatgtttggctatattgcccttatctataatgacctcctttttcatttcaatggcgttcttgtatatatcaagaatgaattatccaggcggcgaggctttaacttcttttaatgacatgattgtggaaaaaaatattacaaacgctacagttcatatcagcatacctccttgcatgacaggtgtcactttatttggtgaattgaactacggtgtgtacggcatcaattacgataagactgaaaatacgactttactgcaggaaatgtggccctcctttgatttcttgatcacccacgagccaaccgcctctcaattgccattcgagaataagactaccaaccattgggagctagttaacacaacaaagatgtttactggatttgacccaacctacattaagaactttgttttccaagagagagtgaatgttttgtctctactcaaacagatcattttcgacaagacccctaccgtttttttgaaagaattgacggccaattcgattgttaaaagcgatgtcttcttcacctataagagaatcaaacaagatgaaaaaactgattgataatagctaacgtcaattccaataaaatatatagcgagcgttttacattaatccacctcgactagacttcaaattttcacttttatatcttacctttataaatttctgttctcaaaatcaaaacaattataaaaaaatgctatcattaa

SEQ ID NO: 2694 - DNA, 1236 bp, Saccharomyces cerevisiae
gtttattaagttccactcattgcagttgtatccccactgtgtacttttatttttggttagagaattggcccagtagagatggaattggacgaatgtttagaaaggctatacaaggcccagttactacctgaagtgactgtaagggcactctgctttaagctgaaggaaatgctagtgaaggagtcaaacgtgattcacattcagacccctgtcacagtcgtgggggatatgcatggacagtttcacgatatgctggagatcttccaaataggcggccctgttcctgatacgaattatctgttcttgggcgactatgtagacagggggttgtacagtgtggaaacaattatgctattgattgtgcttaagcttcgatatcctagtagaattcatcttttgaggggaaaccacgagtcacgtcaaatcacgcagagctatggtttctacacggagtgcttgaacaagtacggtggcaattcaagagtttggcaatatttgacagatatatttgactatctagtgttatgctgtattatcgacgacgaaattttttgtgttcatggtgggctctcgcccaatgttcaaaccatagatcagatcaagattattgatagatttcgagaaattccacacgatggcgccatggcagacttggtttggtctgatccggaagaaaacaataaccccacgttagatcatccagataactctggacaacatttccaggtgtcacctcgtggagcaggttatactttcggaagaagcgtggtggagaaattcttacgtatgaacgatatgaacagaatatacagagcccatcagttatgtaacgaaggttaccagatatattttgatggattggttactactgtatggtcggcgccaaactattgttatcggtgcggcaataaagcatctattctggagctgtatagtaaagatcaattctacttcaacgttttcgaagaggcacctgaaaataaactgttgaaagagaacagtatgaacgacaatgccttagaagatagcatatctaatccggtagccaacaggaaattgattgcagattatttcgaagacgactctgcctccgcagatggctccacggaccctgaaatgtacatattttcagatgtataccaagccagatctgcttctaacagacatgttgattacttcttgtagcttactaaacaatagaaaagcattatagagacaacgccatcttattatttc

SEQ ID NO: 2695 - DNA, 2456 bp, Saccharomyces cerevisiae
acgatgacctttcgagatttcacaagggggataaaggaatgctgtccgatacaattgacacaaagcaacaacagcaacagcttcatgtcctgttcatagactcttatgattcattcacctacaatgtagtgagactaattgaacaacaaactgatatctcaccgggagtcaacgccgtgcacgtgacgacggtacatagtgatacgttccaatctatggatcagctattgccacttttgccgctttttgatgctatcgttgttggcccaggacctgggaatcccaacaatggtgcacaagatatgggtataatatctgagcttttcgagaatgccaatggaaagttagatgaagttccaatattgggtatatgtcttgggttccaagcaatgtgcttggctcaaggtgctgatgtcagtgagctaaatactatcaagcatgggcaagtgtatgaaatgcatttaaacgatgcagccagagcttgtggccttttttctggttatcccgatacgttcaaatctacgaggtaccattcattgcatgtcaatgccgaaggcattgacacccttttgcccttatgcacaaccgaagatgagaacggtattcttttgatgagtgctcaaacgaaaaataagccatggtttggcgtacagtaccacccggagtcatgttgttcagaattgggggggctgttagtcagtaactttctcaagttgagtttcataaataacgtgaagacaggaaggtgggaaaagaagaaacttaatggagagttttccgatatcctatctcgattggataggactattgatagagaccccatatacaaggtaaaagagaaatatccgaagggcgaggacacaacttacgttaagcagttcgaggtctctgaagacccgaaattgacatttgaaatttgcaacatcatacgagaagaaaaatttgtcatgtcatcttctgtgattagtgaaaatacgggtgaatggtctatcattgctttaccaaactccgcatcccaggtattcactcattatggagctatgaaaaagactacagttcattattggcaagatagtgaaattagttacaccttgttgaaaaagtgtctagatggtcaagattcggatttgcctggctcccttgaggtaatacatgaagataaatcccaattttggatcactttgggtaaatttatggagaataaaataatcgataaccacagagaaataccttttattggaggtcttgttggcattttaggttatgaaataggtcagtacattgcatgcggccgttgcaatgatgatgagaattcccttgttcccgacgccaaactagtttttatcaacaatagtatagtcattaatcacaagcaagggaagctttattgtatttctctggataatacatttccagtggcattagaacaatcattaagggacagttttgttagaaagaagaatattaagcaatccctgtcctggcccaagtatcttccagaggagatagacttcattataactatgcccgataaacttgactacgctaaggcgtttaagaaatgtcaggattatatgcataagggtgattcttatgaaatgtgtctcacaacgcaaaccaaagttgtaccatctgcggtgatagaaccctggaggattttccagaccttggtacaaagaaacccggctccattttcaagtttttttgagtttaaagacattattccccgccaagatgaaacgcctccagttttgtgcttcttaagtacttctccagaaaggtttttgaagtgggatgcagacacatgcgagctacgtcccatcaagggaactgtgaaaaaaggaccgcaaatgaacttggcaaaagccacacgaatcctgaagacaccaaaagaatttggtgagaacttaatgattttggacttaatcagaaatgacctttacgagttggttcctgacgttcgggtggaggagttcatgtccgtgcaagaatatgccaccgtttaccaactcgttagcgtcgtaaaggcacatggattgacctctgccagtaagaagacgagatattcaggcattgatgtccttaaacactcgcttcctccgggatctatgacgggagcccccaagaagattactgtgcaattattgcaggacaagatagaaagcaagctaaacaaacatgtcaatggtggagcacgtggtgtttacagcggtgtcacgggatattggtctgtgaattccaacggagattggtctgttaacattagatgtatgtattcctacaacggcggaaccagctggcaactcggtgcagggggggccataacagtcttaagcacactagatggcgaactagaggaaatgtacaacaagttggagagcaacttacaaattttcatgtagatatttgtatattattagatatgtatgcaaacattttctttagaataatatact

SEQ ID NO: 2696 - DNA, 2052 bp, Saccharomyces cerevisiae
accggtagtgacaatgtttgcatcgagatttgaccctagccaattgactgctcctgcagctagcgcaccagaaggaatcgtcggaactactcccccggccattgtgcctttaaagaggcaggctactgaatctgataatgaagaatatggctctcaccaagattctgatgagagttccaactctagttcagaggaagacgaagaccgtatgcaagtagattatggggctagtgaagaggattcgagtgaagtggaagaggaagagagtaagccaagtactcacagcacagtgctatcgagattcaagcaaacagtatcattgcaagaaaggctaggtgcatctgatattgctgagagtaaggaagacgaaggtattgaagacgaggcggcctcaactcaccaactaaaacagattcctcaacctgaattcgtcaaaaacccaatgaatttgaatacaaattcattacagttcaaatctacgggttggttaaatactgagaagatatattatgataattccttgatcaaaccgttctcggattacgcaaatgaattagaagcaaaactactgcagaatatttgcaagaatttctctacaaacacttttcccatccaatcgatcatcctagactccatattaccggtattgaacttcacgttgaacgtatctaagagaaacttcaccagaagaatcggtgatattcttgtaaatgctgctaccggttcaggtaaaactttggcttactccattcctattgttcaaaccctcttcaagagacaaattaacagactgcgttgtataatcatcgtccccacaaaactattgataaaccaagtttatactacgttgacaaagctaactcaagggacgtcgcttattgtgagcattgccaaattagaaaattctttgaaggacgaacacaaaaaattatcaaatttggaaccagatatcttaatcactacacctggtagattagtagatcatctaaatatgaaatcgataaatttgaaaaacctaaagtttttgattatcgatgaggctgatcgtcttttgaaccagtccttccagggctggtgtccaaaactaatgtcccatttgaaaacggataaattagatacacttccagggaacgtgatcaaaatgatcttcagtgcgacattgactaccaacacagaaaagttaaacggcttgaacctttacaaaccaaagttgttcctgaagcaaaccgataaattgtaccagctacctaacaaattgaatgaatttaacatcaacattcccacggcgaaaagtgtttacaagccattgatattgttgtattcaatatgccaatttatggcacattcccccattgctgcaaagattttgattttcgttaaatcaaatgaatcgtctatcagattaagcaagttactacaacttatctgtgaatctcgctcacaatccagcgtattgaaaaaccttcaaaatttggcggtgagtattaattctgtcaattcaaacaactccaaagcagaaaataaaaaaattgttgcgaacttctcgcatcactcggaaagcgcaggcattaccatcttaattactaccgatatcatgtcccgtggtattgatattaacgatatcactcaagtaataaactatgacccaccaatgtcttctcaacaatatgtccatcgtgttggtagaacagcaagagctaacgaacttggttccgcttataacttactagtaggtagaggtgaaagaacgtttttcgatgacttaaacaaagatctagatagagacggtaaatctgtccagccattagaactcgattttaccctattggaatctgattctgaactatatacttcgtctctagaaagtttgaaaaactatcacaataacaccgcacaagcttaatttctcactttccaccttcgcatccattcatttataacattcaaacatttttttttttagtctcattctaataactcctgagtatagtaatattaatatgtatgtattgatgggtatgtaactgtaaaattatattcggtctatgtcta

SEQ ID NO: 2697 - DNA, 855 bp, Saccharomyces cerevisiae
atttagttatcttatgtggactagggtatgacaaacatggctgccaagaatcagttcaaaggaagcagcttcacactagcgcagctaatcgaagaagtcggacgtaacggaggaaaaaagcctgtgttccagtataaggtaccacggtcgatacgatgggcttcaactgctctagctgtagtgtttctcacatatggcgctgcatacactgatatgtcgtggagaactgctcgagaagtgtacggaaacgctactgaggaagaaaaacacagcccgtggttcaagtgcaaaacttttgggcctgtggctttaggggttttgcctgtgatcctcgctgctgccacgaaacacgtaacgtcaagactagtcacagaaatgaaatatctgccaccgctcaagaatagtacggtgccacggtgtcaattgactcgacgcacttacttgttaggaagaccagtttctatcacgagggagatcaatgaactgtctaaaaataaggccaccaagatcttcacaggagtaggttctcaaggtatggaggataaggccacctttgttttcttcacagtggatgaaaaagcaccctcatttttcaataaattttacattttctcgagatctggtagcgttgtgaagaatgacgccaggatcttggactgctttttcaacagtgtggcagaaaataagctattgaacaggtcaatattaactcagatcctttcacatacgtctgccaagaccctatttcactcggggaattctagatcatccatcaagaatatcgtgaagcccaaataggtacggacatctacgtaagaatgcatgtaaataataatcgaataaaagaacaattaa

SEQ ID NO: 2698 - DNA, 1348 bp, Saccharomyces cerevisiae
tgagcaccagcacaatgaccgtttacacagcatccgttaccgcacccgtcaacatcgcaacccttaagtattgggggaaaagggacacgaagttgaatctgcccaccaattcgtccatatcagtgactttatcgcaagatgacctcagaacgttgacctctgcggctactgcacctgagtttgaacgcgacactttgtggttaaatggagaaccacacagcatcgacaatgaaagaactcaaaattgtctgcgcgacctacgccaattaagaaaggaaatggaatcgaaggacgcctcattgcccacattatctcaatggaaactccacattgtctccgaaaataactttcctacagcagctggtttagcttcctccgctgctggctttgctgcattggtctctgcaattgctaagttataccaattaccacagtcaacttcagaaatatctagaatagcaagaaaggggtctggttcagcttgtagatcgttgtttggcggatacgtggcctgggaaatgggaaaagctgaagatggtcatgattccatggcagtacaaatcgcagacagctctgactggcctcagatgaaagcttgtgtcctagttgtcagcgatattaaaaaggatgtgagttccactcagggtatgcaattgaccgtggcaacctccgaactatttaaagaaagaattgaacatgtcgtaccaaagagatttgaagtcatgcgtaaagccattgttgaaaaagatttcgccacctttgcaaaggaaacaatgatggattccaactctttccatgccacatgtttggactctttccctccaatattctacatgaatgacacttccaagcgtatcatcagttggtgccacaccattaatcagttttacggagaaacaatcgttgcatacacgtttgatgcaggtccaaatgctgtgttgtactacttagctgaaaatgagtcgaaactctttgcatttatctataaattgtttggctctgttcctggatgggacaagaaatttactactgagcagcttgaggctttcaaccatcaatttgaatcatctaactttactgcacgtgaattggatcttgagttgcaaaaggatgttgccagagtgattttaactcaagtcggttcaggcccacaagaaacaaacgaatctttgattgacgcaaagactggtctaccaaaggaataagatcaattcgatatgtaacatttttcttttcttttcttttcctttttttacaatagctaatttacgtttccctacggtattggtcggaacgaccaagcttcaatttataaatatcttaattttaacagcagttaccacttgaa

SEQ ID NO: 2699 - DNA, 2275 bp, Saccharomyces cerevisiae
aataaaagctaaaaaaaccaaaaaatttcagatgacattatctttcgctcattttacctacctgttcacaatattgttgggattaactaatattgccttggcatctgatccagaaacgattctagtgacgataaccaagacaaacgatgcaaatggggttgttacaactacagtttcacccgcgctagtctccacatccactatcgttcaagctggcactacgacattgtatacgacttggtgtccattgacggtatccacttcatctgctgccgaaataagtccttcaatatcgtacgctactaccctatccagatttagtactttgacattatctacagaagtctgctcccatgaggcatgtccttcgtcatcgacgttgccaaccaccaccttatctgtgacttccaagttcacttcatatatttgccctacttgtcacacaaccgctatcagctcattatccgaagtaggaactacaaccgtggtatcatccagcgccattgaaccatcaagtgcctctataatctcacctgtcacctctacactttcgagtacaacatcgtccaatccaactactacctccctaagttcgacatctacatctccaagctctacatctacatctccaagctctacatctacctcatcaagttcgacatctacctcatcaagttcgacatctacctcatcaagttcgacatctacatctccaagttcgacatccacatcttcaagtttgacatccacatcttcaagttctacatctacatcccaaagttctacatctacctcatcaagttcgacatctacatctccaagctctacatctacctcatcaagttcaacatctacatctccaagttctaaatctacttctgcaagctccacttccacttcttcatattcaacatctacatccccaagtttgacttcttcatctccaactttggcttccacttctccaagttcaacatctattagctctacttttactgattcaacttcatcccttggctcctctatagcatcttcatcaacgtctgtgtcattatacagcccatccacacctgtttactccgtcccttcgacttcgtcaaatgttgcaactccttctatgacttcttcaactgttgaaacaactgttagttcacaaagttcgtctgaatatatcaccaaatcctcaatttctactactatcccatcattttccatgtctacatatttcaccactgttagtggagtcactacaatgtatacgacatggtgtccttatagctctgaatctgagactagcacattaaccagtatgcatgaaacggttacaacagacgctacagtctgcactcacgagtcttgcatgccctcgcagacaacaagtttgattacatcttctataaaaatgtccactaaaaacgtcgcaacttctgtaagcacctcaacggttgaatcctcatatgcatgctccacatgtgctgaaacgtcacactcgtattcttccgtgcaaacagcttcatcaagttctgtaacacagcagaccacatccacaaagagttgggtaagttcaatgacaacttcggatgaagatttcaataagcacgctaccggtaagtatcatgtaacatcttcaggtacctcaaccatttcgactagtgtaagtgaagccacgagtacatcaagcattgactcagaatctcaagaacaatcatcacacttattatcgacatcggtcctttcatcctcctccttgtctgctacattatcctctgacagtactattttgctattcagttctgtatcatcactaagtgtcgaacagtcaccagttaccacacttcaaatttcttcaacatcagagattttacaacccacttcttccacagctattgctacaatatctgcctctacatcatcactttccgcaacatctatctctacaccatctacctctgtggaatcgactattgaatcttcatcattgactccgacggtatcttctattttcctctcatcatcatctgctccctcttctctacaaacatctgttaccactacagaagtttccactacttcaatctccatacaataccaaacttcatcaatggtaacaattagccaatatatgggcagtggatcgcaaacgcgtttgccattaggaaagttggtcttcgccatcatggcagttgcttgcaatgtaattttcagttaatatcagaacaatttaattcatttatataaacatatacaatcaatcgaataaaaatacaacaatgta

SEQ ID NO: 2700 - DNA, 560 bp, Saccharomyces cerevisiae
tcttcggctctacacatcatattactagcctagtcaacatgaagttcttaaccaccaacttcctaaagtgctccgttaaagcctgtgacaccagcaacgacaacttccccctacagtacgacggcagcaaatgccaattggtacaggatgaatctatcgagttcaatccagaattccttctgaacatagtcgaccgcgtagactggcctgcagtgctcacggttgctgccgaattgggaaacaacgccttacctcctaccaaaccatccttcccatcttcgatccaggagctcaccgatgacgacatggccatccttaatgacttgcatactttactgctacagacgtccattgccgaaggtgaaatgaagtgtaggaactgcggacatatctattacatcaagaacggcattccaaacttgctgttacctccacacctggtataaatcaagcgagatctctgtgtgtgggcacgcaagacgaaaagacaactatatacacagctatatatgtagtagtagcctcatatacgtatggcatcaaacatgtagcataaacaa

SEQ ID NO: 2701 - DNA, 781 bp, Saccharomyces cerevisiae
tcgcttaaaaataactaataacaataatccctaaaatgaaattctcttccgctttggttctatctgctgttgccgctactgctcttgctgagagtatcaccaccaccatcactgccaccaagaacggtcatgtctacactaagactgtcacccaagatgctacttttgtttggggtggtgaagactcttacgccagcagcacttctgccgctgaatcttctgccgccgaaacttctgccgccgaaacctctgctgccgctaccacttctgctgccgctaccacttctgctgctgagacttcttctgctgctgagacttcttctgctgatgaaggttctggttctagtatcactaccactatcactgccaccaagaacggtcacgtctacactaagactgtcacccaagatgctacttttgtctggactggtgaaggcagcagcaacacctggtctccaagtagtacttctaccagctcagaagctgctacctcttctgcttcaaccactgcaaccaccactgctgaaacttcttcctctgctacatcctctagcaccgctgaattatctagttacaccggtgctgctgatgccatcaccgctggtactggtttgatgggtgctgcccttgctgccgtcatgttattgtaaatgatatgtgaataatcatgcgggatatccgatttttatgaagcaccttgcggcttggccttttttcgaagttatgttagaataaaaaaattttaataacacacattaagtatgtatgtatatatactgtt

SEQ ID NO: 2702 - DNA, 1503 bp, Saccharomyces cerevisiae
gatacgtactatcgcattattctaatataacagttaggagaccaaaaagaaaaagaaatgtcagagccagaatttcaacaagcttacgaagaagttgtctcctctttggaagactctactcttttcgaacaacacccagaatacagaaaggttttgccaattgtttctgttccagaaagaatcatacaattcagagtcacctgggaaaatgacaagggtgaacaagaagttgctcaaggttacagagtgcaatataactccgccaagggtccatacaagggtggtctacgtttccatccttccgtgaacttgtctatcttgaaattcttgggtttcgaacaaatcttcaagaactccttgaccggcctagacatgggtggtggtaaaggtggtctatgtgtggacttgaagggaagatctaataacgaaatcagaagaatctgttatgctttcatgagagaattgagcagacacattggtcaagacactgacgtgccagctggtgatatcggtgttggtggtcgtgaaattggttacctgttcggtgcttacagatcatacaagaactcctgggaaggtgtcttaaccggtaagggtttgaactggggtggttctttgatcagaccagaagccactggttacggtttagtttactatactcaagctatgatcgactatgccacaaacggtaaggaatctttcgaaggtaagcgcgtcaccatctctggtagtggtaacgttgctcaatacgctgccttgaaggttattgagctaggtggtactgtcgtttccctatctgactccaagggttgtatcatctctgaaactggtatcacctccgaacaagtcgctgatatttccagtgctaaggtcaacttcaagtccttggaacaaatcgtcaacgaatactctactttctccgaaaacaaagtgcaatacattgctggtgctcgtccatggacccacgtccaaaaggtcgacattgctttgccatgtgccacccaaaatgaagtcagcggtgaagaagccaaggccttggttgctcaaggtgtcaagtttattgccgaaggttccaacatgggttccactccagaagctattgccgtctttgaaactgctcgttccaccgccactggaccaagcgaagctgtttggtacggtccaccaaaggctgctaacttgggtggtgttgctgtttctggtttagaaatggcacaaaactctcaaagaatcacatggactagcgaaagagttgaccaagagttgaagagaattatgatcaactgtttcaatgaatgtatcgactatgccaagaagtacactaaggacggtaaggtcttgccatctttggtcaaaggtgctaatatcgcaagtttcatcaaggtctctgatgctatgtttgaccaaggtgatgtattttaaatagtctaaaagaaagaaaagaggaaagttcataaaaagttctttcttttttttaaataacttagatagataatgagataa

SEQ ID NO: 2703 - DNA, 2279 bp, Saccharomyces cerevisiae
attaaatatattcaaaagttgttgcacatttgattttacagaagtaatatacactgattgtgcgtacggttaattcgcaactaaattcaatcagtacaagaaaaatttttattccgttccatcattattgaaagataaactatcacattgcgataataaactaaaagacactaggatactgccttcggatataaacatttaagtttaatttattactgtttttttaagggtttaacagcaacatttcagtttctataatacaaataaaaaaaggaagactaatattgaccgaaaaaaagttatgttaagtcctgaacgtagaccatccatggcagaacgccgcccatcatttttcagttttactcaaaatccaagtcctctagttgtcccgcatttagccggtattgaagaccctttgccagccactacaccagataaagttgatgttttaatcgcagggactggtatggtagagagtgtattggctgctgcattagcttggcaaggttccaatgtccttcatattgataagaatgattattacggtgacacttcagccacactaactgtagaccaaatcaaaagatgggtaaatgaagttaatgaaggctcagtaagttgctataaaaatgcgaagttgtatgtatccacgctaatcggtagtggtaaatattcttcaagagatttcggtattgatctttccccgaagatcctatttgcaaaatctgatttattatccatcttaatcaaatcaagagttcaccagtatttagaattccaatctttatctaatttccatacttatgaaaatgattgtttcgaaaaactaacaaatacaaagcaagaaatattcacggatcaaaacctaccactaatgacaaagaggaacttaatgaaatttatcaaattcgtactcaactgggaagcacaaacggaaatatggcaaccctacgcggagaggaccatgtctgattttttaggggaaaagtttaaattagaaaaaccacaagtcttcgaattaatcttctcaattgggttatgttatgatctcaacgtaaaagtaccagaagctttacaaaggattcgtcgatatctaactagtttcgatgtttatggaccattccctgcactatgctccaagtatggtgggccaggagaattgtcgcaagggttttgtagatctgccgctgtaggtggcgctacttacaaactcaatgagaaattggtatccttcaaccctacaactaaagtggccacattccaagatggatccaaagttgaagtttcagagaaagtgataatatcgcctacgcaagcacctaaagacagtaagcatgtccctcaacaacagtaccaggttcatcgtttgacctgtatagttgaaaacccctgtactgaatggttcaatgagggtgaatcggccgccatggtagtcttccctcctggctctttgaaatctggtaataaggaagtagtacaagcctttattctcggtgctggcagcgaaatttgtccagaaggaactattgtatggtatttatcgaccacagaacaaggcccacgtgctgaaatggacattgatgccgctctagaagctatggaaatggccctgctaagggaatcgtcttcaggtttagagaacgacgaagaaattgttcaactaacgggaaatggtcatacaatagtaaattcagttaagttaggccaatcttttaaggagtatgttcctagggaaagattacagttcttatttaaactttattatacccaatacacatccacgccaccctttggtgtagttaactcctccttctttgatgtaaatcaagatttggaaaaaaagtatattcccggtgcgagtgataatggcgtcatatatacaaccatgccttctgctgagatatcgtatgatgaagtagtcaccgcagccaaagttttatacgaaaagatagttggcagtgatgatgacttcttcgatttagattttgaagatgaggatgaaatacaggctagcggcgttgctaatgcggaacaatttgaaaatgccatagacgatgacgacgatgtcaatatggaaggttccggtgaatttgtaggtgaaatggagatatgacgagcaagacatattctatttagtatttttttcccttcaggaaacggtgattaatgtcttcttacaagttaatgaatagtatatatatgtaaaaaaaaattctgcttcatgtatatacgcacctcgttattgaggtattgcgaatgtagcagttgaataagcaaag

SEQ ID NO: 2704 - DNA, 586 bp, Saccharomyces cerevisiae
cacggagcagtttaattatcttactgtcgaagaagtcaaaaactagactatatattattgagaagaaaaatgtctgacgttgaagaagtcgttgaagttcaagaagaaactgttgttgaacaaactgccgaagttactatcgaagatgctttgaaggttgttttgagaaccgctttggttcacgatggtctagctagaggtttgagagaatctaccaaggctttaaccagaggtgaagctttattggttgttttggtcagctctgttactgaagctaacattatcaagttggttgaaggtttggctaacgacccagaaaacaaggttccattgatcaaggttgctgatgctaagcaattaggtgaatgggctggtttgggtaagatcgaccgtgaaggtaacgccagaaaggttgtcggtgcctccgttgttgttgtcaagaactggggtgctgaaactgatgaattgtccatgatcatggaacacttctcccaacaataaacggtgtgatgttcattagtactttttctagagttagatcacataataatatatagttaaacttttatttaattgtaagttatat

SEQ ID NO: 2705 - DNA, 1024 bp, Saccharomyces cerevisiae
cgagcgtcgcatcatcaaattaacaaaagcataactcttcagcaatgacatcaattggtactggttacgatctttccaatagtgttttttcccccgatggtagaaatttccaagtagagtatgccgtcaaagcagtcgaaaacggtaccacatcaatcggtataaagtgtaacgacggtgtagtctttgcagtggaaaagctcattacgtctaaactgctggtcccacaaaaaaatgtcaagattcaagtcgtagaccgtcacatcggttgcgtttattcaggtttgattcctgatggtaggcacctggttaatcgtggtcgtgaagaagccgccagcttcaaaaagctgtataaaacgcccattcccattcctgcatttgcagaccgtttaggacaatatgtgcaggcgcacactttatacaacagtgttagaccgttcggggtcagtaccatctttggtggtgtagataaaaatggtgctcatctttacatgttggaaccaagtggctcttattggggctacaagggggctgccactgggaaaggtaggcaatctgcgaaggctgaattggaaaaattagttgaccatcatccagaaggtctttcagcaagagaggccgttaaacaagctgcaaagattatctatttggcacacgaggataacaaggaaaaggattttgaattggaaataagttggtgttcactgtcggaaacgaatggtctgcacaagttcgttaagggcgatctgctacaggaagctatcgattttgcccaaaaagaaattaacggcgatgatgacgaggacgaagatgacagtgataacgtcatgtccagtgatgatgaaaatgctccagtggctacgaatgcaaacgctaccactgaccaagagggtgatattcacctagaataggtgacattctgataatacgttaagaagaaccaaagagttgaaataatatgaactcacgtgtaacgccgcgaaacaaaaaatacattttagtaccttccattacattttacgta

SEQ ID NO: 2706 - DNA, 2358 bp, Saccharomyces cerevisiae
atgaaaaattttcttccacgcacattgaaaaatatttacgaattatatttcaataacatctcagtacatagtatagtatctcgcaacacacagctcaaaaggtcaaagataattcaaatgactaccgagactttcgaagacattaagctagaggacatccctgttgacgacattgatttttccgacctggaagaacaatacaaggtcactgaagaattcaatttcgatcagtacatcgtcgttaatggtgccccagtcatcccatccgccaaagttcctgttttgaaaaaggctttgacttctttgttttccaaagctggtaaagttgttaacatggaatttccaattgatgaagccactggtaagacgaaaggttttctcttcgtggaatgtggctcaatgaacgatgctaaaaaaattatcaagagtttccacggtaaaagactggatttaaaacatcgtttgtttctttatactatgaaagatgttgaaagatataattctgacgactttgacaccgaattcagggagcctgatatgcctacattcgttccatctagttccttaaaatcctggttaatggacgacaaagtgagagatcagtttgtattacaagatgacgtgaagactagtgtgttctggaactctatgttcaatgaagaagattctttggtggaatctagagagaactggtctaccaattatgttagattctccccaaagggtacctatttgttttcttaccatcaacagggtgtaactgcatggggtggtccaaacttcgatcgtttgagaagattctatcatccagatgtaagaaactcttccgtctctccgaatgaaaagtacctggtcactttctccacggaaccaatcattgtagaagaagataacgaattctctccatttaccaagaaaaatgagggtcatcaattatgcatctgggacattgcttctggtctgttgatggcaactttcccagtgataaagagcccatatctgaaatggcctttagttagatggtcttataatgataaatattgtgctcgtatggttggagacagtttaatagttcacgatgctactaaaaacttcatgccattagaagctaaggctttgaagccttctggtattagagatttctcatttgctccagaaggtgttaaattacaaccattcagaaacggtgacgagccttctgttttattggcttattggactcctgagactaataattccgcttgtactgctaccattgctgaagttcctcgcggtagagtgctaaaaaccgttaacttagttcaagtctccaacgtaactctgcactggcaaaaccaagctgagttcctgtgcttcaatgtcgaacgtcacacaaagtctggtaagactcaattcagtaatctacaaatttgtaggttgactgaaagagatataccagttgaaaaggttgaattgaaagatagtgtctttgaattcggttgggaaccccacggaaatagatttgttacaatttctgttcatgaagtagctgatatgaattatgctatcccagcaaatacaatcagattttacgctccagaaactaaagaaaagactgacgtaattaaaagatggagcttggtcaaagaaattccaaaaacttttgccaacactgtttcttggtctccagcgggtagatttgtggttgtaggtgctttagtgggtccaaacatgcgtagatcagacctacaattttacgatatggactatccaggtgaaaagaatattaatgacaataatgatgtttcagcttctttgaaagatgttgctcatcctacctactctgcggctactaatatcacttgggatccatctggtagatacgttaccgcatggtcaagttctttgaaacacaaggtggagcatggttacaaaattttcaatattgctggtaacttagttaaagaagacatcattgctggcttcaagaactttgcctggagaccaaggccagcttccattttgtctaacgccgaaaggaaaaaggttaggaaaaacttgagggaatggtctgcccaattcgaagagcaagatgcaatggaagctgacaccgccatgagagatttgattctacaccaacgtgaattattgaagcaatggaccgaatatagagaaaaaattggccaagaaatggaaaaatctatgaatttcaaaatctttgacgttcaaccagaagatgccagcgatgactttaccaccatcgaagagatagttgaagaagttttggaagaaacaaaggaaaaggtcgaataaatttcatgaacttacgggcttgtatgtaaactaacaacaatatctagtataagtatgagaattagt

SEQ ID NO: 2707 - DNA, 1883 bp, Saccharomyces cerevisiae
gactaaaaagcgcaaatttgagataaagtgggatcttcctgatattagctgtcgttactggttttagcacgagttaccgactattttgcgtttttcttttaaattattttgttgtccctctttatcttttgcactgacgctttattagccactaattagagtatccagacattctttttgagatcactactacttaattgaagaaaacataacctattgatatgtccaccctttttctgattggaatacacgagattgagaaatctcaaacaattgtacagaatgaacactattttgatagagtgattgagcttcaagatttggattctctgatggtagcattgtataaggacagagtttcgccttttccaaacgtccataactttgaaacgggcgtatctatagttctttatgacccttcaaaatttcaattatctgtgcgacaattggatgttctattcaagcgatttttcccatctttcaatatttctgcgatagatcatacacgagaggaaaacctgcaacgtcttgaatgtgttgagcgtgaaaatagcatctgtcgtaatagaataacgagaattaaccactggatgtatcaccatcatgatgatactccagacggtattaacaaaaacagctatggtactgtaaatgggaattctgtccccactcaagcatgtgaagcaaacatttacactttattattgcatttgaatgattccaaggcacaacatttacgaaaggcatcagtgccaaggctaattcgcaacatcgagtttatgtcttttttgtcagatccaatagaaaaaatttctcaagagggatcacattattggaacattctatcaacttgggacttttgtgctttatcattaagcactcaagaattgatttggtgcgggttcacgcttatcaaaaagttatctaaggatgcaaaagtactcattgcagataataagttactgctactactatttactttagaatcatcctatcatcaagttaacaaatttcacaattttaggcatgccatcgatgtcatgcaagccacatggcgattgtgtacatatcttcttaaagataatcctgtacaaacattactgttgtgtatggctgccataggtcatgatgtcggtcatcctgggactaacaatcaactattgtgcaactgtgaatcagaggttgctcaaaatttcaaaaatgtctctatcttggagaattttcacagggaattatttcaacaattgctatcagagcattggcctcaattgctatctatctccaaaaaaaaatttgattttatttccgaggctattctggccacagatatggcattgcattctcagtatgaggatagattaatgcatgaaaacccaatgaaacaaatcactttgatatctctaattattaaagctgcagacatctctaatgtgacgagaaccttgtcaatatcagcacgttgggcatacctcattactctcgaatttaatgattgcgctcttttggaaacatttcataaagctcaccgcccagaacaagactgttttggcgattcatacaagaatgttgattctccgaaagaagatttggaatcaattcaaaatattttggtgaacgtaacagaccctgatgatattatcaaagaccatccgcatattccaaacggtcaaatatttttcattaatacgtttgctgaagtatttttcaacgcattaagtcaaaaattctcaggattaaaatttttaagcgataatgtcaaaatcaataaagaatactggatgaaacacaagaaaccacaatagcaagaatatcaaaatttcttgtaccattcattgtataaacatataaatatatacatttactactagtatatttccttttgt

SEQ ID NO: 2708 - DNA, 599 bp, Saccharomyces cerevisiae
cacaaagtatgccaagagaattcaaatcctttgggtctacagaaaagtctttgctgtcaaaaggacatggagagcctagttacagcgaaatatacgctgagcctgagaactttttagagattgaggtgcacaaccctaaaactcatataccaaatgggatggattcgaaggggatgtttacagattacgaaataatatgccgtacaaacttgccaagttttcacaagagggtatcgaaagtaaggagacgatactcagactttgaattcttccgcaaatgcttgatcaaggaaatttctatgcttaatcacccaaaagtcatggtacctcatttaccgggtaaaattctcttgagtaatagatttagtaacgaagtcattgaagagaggagacaaggtttgaatacctggatgcaatcggtagccgggcacccgcttttacaatctggttctaaagttctcgtgaggttcattgaagctgaaaagtttgtcggctgaaaagaactcttttacgtgaataaataatatagattatataaaagaatgaatagaaaaatttaaataaataatgaataaaataattaaataaataatgaatcc

SEQ ID NO: 2709 - DNA, 2260 bp, Saccharomyces cerevisiae
ggatacagatgctttcccataatgctttaagggcctttgattgttcaaaggtgattatttcacgaagatgtctaacctcttcaacatcgatataccaacaaagcagcgttcacttacaagaaacagatgatggacattcaggaaatagagaaaagcacgtctcaccgtttgaaagggtacaaaatttggctgctgatttgaagaacgagttgaaagctccagattcagatatcaatgaagtttttaatgactttaaagataagattgaatcgttgaaacagaaattaaggaacccttcacctatggaaagatcacacttgttagcgaatttttcttcggatctcctacaggaattaagttacagaagcaaaaatatgacgctagatccttatcaagtattaaacacattgtgccaatacaaattggcacgctcacaacatttcacgattgttttaaagtaccttctatataatcaatcaccacaggacgttattgccttatgggtgaagtacttggaaaccatttccgaaaacccagtgatcttacttcaaaatagttcttctcgtgcacatatgcaaaatattgcaattaccaccattgcttacttatctttaccagagaatactgtggatatcaatattctgtataagattttacagatcgatcgtaaaatgggccaggttttaccttttaacatgattagaagaatgttaagtacagaatttagctctcttgaaagaagagacgtgattatcaaaaatctaaacactttgtactatcaatacacagtacaggatagtgatcatttcttaagtcaaattgaaaatgctcctagatggatagatttaagggatctttatggccaatacaataaacttgaaggtgagaaaaatgtagagatcataagcaagttcatggacaagtttattgatttggataaacccgaccaagttgttactatttataaccagtatagcaaggttttcccaaatagtacgtcgctgaaagattgtcttttaagagctgtgtcgcacttacgagctaaatcgagtaaagagaagttggacagaattctagcagtctggaacagtgttatcaaaccaggagataatattaaaaacacatcttatgcgacgctagttaacgcactaactgattctggaaatttcaaccatttaaaggaattttgggaagaagaacttcctaaaaagttcaagaaagatcccatcgtgaaggaagcatttctcctggccttatgtcaaacttcgcctctaaagtatgaccaagtcaaaggggagttagcagagactgttaaaaccaagaagttgttcaataaagttttattgctaatgttagatgatgaaaaagtgagcgaagaacaattcaacacattttactataaccattatccatcagatggtgtgttaccccctactttggatactctaagcattaaaatgtacgctaattataaatttcaggcagaagatacacgcccacaattcgatctattgcaaagtgtttccattaatcccaccgattatgaaaaggttgaaaagattacgaaagcctttatttcagtgtgccccactgtcgagccgattcgtcaactttacaaacaattgggaactcacttaaatgctaggaattatgcagactttatttccgcagagtttaataagcctgacggcacagtggccgaggcaaagaatttgttttctgattttctctcatatcaaaagactagaaagagaaacgtggataatacgcctctaaatgctttattattggggttctgtgataaactttacaagagtaaacatagcgagtacgttccctacatcgaaaagtactacaatctagctaaggattcaagtatcagggtgtcgaacttggccgtttcgaaaattctattcaacttggccacatttgcacgcaatactcagcagttatctgacaaagaggttgcttttattaaccagtttatgcgagatttaggcactaatgagggttttcgtcccaaccctaaggatattcaaattttaaaagaatgtgatggaattactgttccagaaaagttgacttaatacacttgtcataagaagacaataagaaaagctcagaaccaattttctgcacatatgatgctgtaactatataatgatttcttgtatataacttccgtataatagttattgcttccatgcatgattctttcaaagaacaatacaaaataaaaataaaaaaaaaaaaaaaaaat

SEQ ID NO: 2710 - DNA, 1652 bp, Saccharomyces cerevisiae
caaagaacataaaacattttgaagcagagcggtgaaacgcaactatattttactttcatcctctacgtccattgtaagattacaacaaaagcactatcgatgccagagtccagattgcagagactagctaatttgaaaataggaactccgcagcagctcagacgcacctccataataggtaccattgggcccaagacaaatagctgcgaggccattactgctctgagaaaagctggtttgaacatcattcgattgaacttttcccatggctcctacgaattccatcaatcagtaatcgaaaatgctgtgaaatcggaacagcaattccctggcaggccgctcgccattgccctggataccaagggtcccgagatcagaacaggtcgcacgttaaatgaccaagatctttatatccccgtagaccaccaaatgatctttaccactgacgcaagttttgcaaacacctccaatgataaaatcatgtatatagactatgctaacctgacaaaagttatcgttccggggagatttatatacgtggacgacgggattctctcttttaaagtgctccaaatcattgacgaatctaatttaagggtgcaagcggtaaactcgggttatatcgcatctcataaaggtgttaatctgcctaataccgacgttgatttgccccccttgtccgccaaagacatgaaggacttgcaattcggagtccgcaatggcattcacatcgtatttgcctctttcataagaacttcagaagatgtgttgtctatcagaaaagcgttgggttctgaagggcaagatatcaagattatatccaagatagaaaaccagcaagggttggataattttgacgaaatcctggaagtcacggatggtgttatgatagcgagaggcgatttaggaattgaaatcctggcacctgaagtattagccattcaaaaaaagctgattgcaaaatgtaatttggcgggcaaacctgtcatttgcgcgactcagatgctggattcaatgacacacaatccgagaccgacaagggctgaagtatcggatgtgggtaacgctgtgttggatggtgctgattgtgttatgctttctggagaaacggcgaagggtgattatccggtgaatgcagttaatattatggcggcgaccgctctgattgctgaaagtactatcgctcatttggctctttatgacgatctcagagacgccactcccaaacctacttccactacggaaactgtagcagctgcagctaccgcagcaatcttggagcaagatggtaaggccatcgttgtattatctactacagggaacacggcaaggctactgtcgaagtatagaccaagctgccctatcatattagtaacaagacacgcaagaacggcaagaattgcgcatttgtatagaggtgttttcccatttctgtatgaaccgaaacgcctagacgactggggtgaggatgttcataggcgcctaaagtttggtgttgaaatggcgaggtctttcggaatggtggacaacggtgatactgttgtttccattcaaggattcaaaggaggagtcggccattccaataccttacgcatttctactgttggtcaagaattctagtaaaaattaaagtccttattttttttacttaa

SEQ ID NO: 2711 - DNA, 1277 bp, Saccharomyces cerevisiae
tttcttgctcctaatgagttttcttgaggttgatattacgaatctattgctcatctatggtagtggcgtccctattagccaatttacattaatacagcatcgctaaatacaagcttgtttcctgcatttttcgatagaaaagaaaaaatgactattctagaggagcttaatgattcaagcattcctcagaggctagataatcacatatttttcggctccgtacattcactgacgcatacagatttcctagtagaaaataacattaggtttttcataaacgttgatttatcgactgaactaatatcacatatctatcatgaggtccgctcaaagtttgcccatgaaatagtaattgtcaacatcgacaatgactctcaaataccaatagaaagcgatttggtgcgttccttccattggcacaacacttcccttttgcaacaattgatccatcatctcgattttctcagcggtattaataatcacggcgaaccattaactccaccaccagaatctcattacagaaatgcgtatgttcaattcgaccatccaagtgactcagtatcgatattagataaacttttatatggtaataagtcagaatactcgcgtacaaatattttccaagttaccaacgaagcgaagtttcaagtcttcaacgacctaattacaattttcaaatactctatcgctcaaggcgggaataccaatagtaacatacttgttctctcagaaaacggcagcaccgatgaaaatttgataagtttactgatgtctaccgtattgaaagaaaacccaactttcaacgtttaccaggccctccaattcgttaagtctattgcagtaattcctgatacggtaagagatgaaaaaatcttatgggtcacaggatttatcaactatcaagaattaatcaagaaaaatgaaatgtattggggcctaggttcgcaaaagggtcgcaaacttacgtcctttgcgtccccaatatcgaaagtggaaagaaaacaaagaagacgtgacgaccagaatatcatgcgatcaaagctaccacaacagagacaaaaccccttctgctcaacagagagacctaaaagggctcgctgcgattagtttcacgaagaagaaggccaaatcaatgtccatacctaacgaactacaacactattcaaatgacactaagaacaatttcgaaaaaaagaaaaaagaaaatttataaatgtatatatttgtatacataaataaatgcataagcattgacaggctccataattatgtaccat

SEQ ID NO: 2712 - DNA, 1159 bp, Saccharomyces cerevisiae
tatacactccctcgtttttttgcttatatataataatatcagaaagataagagacaaacgtggattatgtcacaagtaaaaagagccaatgagaaccgcgaaaccgcaaggttcatcaagaaacacaaaaaacaggttacaaacccaattgatgagaaaaatggaacttccaactgtatagtgcgtgttcccattgctctctatgtttctttggcaccaatgtatttagaaaatcccttgcaaggtgtcatgaagcagcacttgaacccattagtaatgaaatataacaacaaagttggaggtgttgtgctaggttatgaagggttgaaaattcttgatgctgatcctttaagcaaagaagatacatcagaaaaactaataaaaatcacacccgataccccttttggatttacttggtgccatgtaaacctatacgtttggcagccacaagttggagatgttttggaaggttacattttcattcaatccgcctcacacattggtcttttgattcatgatgcgtttaatgctagtatcaaaaagaataatatccctgtggattggacctttgtccataacgacgtggaagaagatgctgacgtgataaacacagatgaaaataatggaaacaataataacgaagataacaaggatagcaatggtggaagcaatagtttgggcaaattttcctttggaaacagatctttgggccactgggtagattctaatggtgaacccattgacggtaaattgaggttcacagtgagaaatgttcatactacaggaagagttgtttctgtggacggtacattaataagtgacgccgacgaagaaggcaatggctataacagctctcgttcccaagctgaaagtttacctatagtttcaaacaaaaaaattgtatttgatgacgaagtttcaatcgaaaacaaagagagccacaaggaactagacttacctgaagtaaaagaagataatggttcagagatcgtatacgaggaaaacaccagtgaaagcaatgatggtgaatcgagtgatagtgattaggacgggaaaaatgagaaaaaatcaaaacaaataaagatatacgttattgatataggataatataaataattgtacattattacagtgctgataatcaatagtcctgcatacg

SEQ ID NO: 2713 - DNA, 3085 bp, Saccharomyces cerevisiae
acatcttcttatttaagacaagacgacgtcaactaccggattaaggaacttgactctttctttcaagaagcaattaactacatcaactagaaccataatgacgatcggtgataagcaaaaatggaccgctactaatgtccgtaatacctttctagactatttcaaatctaaagaacacaagtttgtcaaatcctctccagtagttccatttgatgatccaactttacttttcgctaatgccggtatgaaccaatacaagcctatctttttaggtactgtcgatccagcttccgatttctacaccttgaaaagggcttacaactctcaaaagtgtatcagagctggtggtaaacacaacgatttagaagatgtcggtaaggattcttatcatcataccttttttgaaatgctgggtaactggtcgtttggcgactatttcaagaaggaagctattacttactcatggactttgttgactgaagtatacggcattccaaaggatagattatacgttacctattttgaaggtgatgaaaagttaggcttggaacctgatactgaagcccgtgaactatggaaaaatgttggtgttcccgatgaccatatattacctggtaatgcaaaggacaacttttgggaaatgggtgaccaaggcccatgtggtccttgttctgaaattcactacgatagaataggtggtagaaatgctgcttccttggttaatatggacgaccctgatgtcttggaagtttggaatttggttttcattcaattcaacagagaacaagacgggtctttgaagcctttacctgccaagcatatcgacacaggtatggggttcgaaagattggtttctgttctgcaagatgttagatctaactatgataccgatgttttcacacctttgttcgagcgtatccaagaaatcacttcagttagaccatattctggcaattttggtgagaatgacaaggacggtatcgatactgcctacagagttttagctgatcatgtccgtacattgacttttgccttagctgacggtggcgttccaaacaatgaaggtagaggatatgttttgagacgcattctaagaagaggtgcccgttacgcccgtaaatacatgaattacccaatcggtaactttttctccactttggctccaactttaatttctcaggttcaagatatctttcccgaattagccaaggatcctgcattcctctttgaaatcttggatgaagaagaagcttctttcgctaagaccttggatcgtggtgaaagactatttgaaaaatatgcttctgctgcttctaagactgaatctaagactttagacggtaaacaagtttggagactttacgacacttatggtttcccagtcgacttgactgaattgatggctgaagaacaaggcttgaagattgatggacccggtttcgaaaaggccaaacaagagtcatacgaagcatccaaaagaggtggtaagaaggaccaaagtgatttgattaagttaaacgtccatgaattatccgagttgaacgatgctaaggtgcccaagactaatgatgaattcaaatacggcagcgccaacgtcgaaggtaccattttgaaactgcatgacggtaccaactttgttgatgagatcactgaaccaggtaagaagtacggtattattttggataaaacatgtttctacgccgaacaaggtggtcaagaatatgacactggtaaaattgttattgatgacgctgctgagtttaatgttgaaaatgttcaattgtataacggttttgttttccacaccgggtctttagaagaaggtaagttgtctgtcggtgacaagattatcgcttcattcgatgaactacgtcgtttccctattaagaacaatcatactggtacacatatcttaaactttgctctgaaggaaactttgggtaatgatgtcgatcaaaagggttctttggttgccccagaaaaattgagattcgatttctctcataaaaaggctgtgtcaaatgaagaattgaaaaaagttgaagatatctgtaatgagcaaattaaagaaaacttacaagtgttttacaaggaaattccattggacttggccaaatccattgatggtgttcgtgctgtctttggtgagacttacccagatccagttcgtgtagtttctgttggtaagccaatcgaagaattgttggccaacccagctaacgaagagtggaccaagtattctattgaattttgcggtggtacccatgtcaacaagacaggcgatattaaatacttcgtcattttagaagagagcggtattgcaaagggtatcagaagaattgttgctgttactggaactgaagcctttgaagctcaaagattggctgaacagtttgctgctgatttggatgctgcagacaagctgccgttctctccaatcaaagaaaagaagttgaaggaacttggtgtcaaacttggtcaactttcaatttctgttatcacaaaaaatgaactgaagcagaaatttaacaaaattgaaaaagcagtgaaggatgaagttaagtcaagggccaaaaaagaaaacaaacaaactcttgatgaagtgaagacatttttcgaaaccaatgagaatgctccatacctagttaaattcattgatatttctccaaatgctaaagctatcactgaagcgatcaactacatgaaatccaatgattctgtcaaagacaagtcaatctatttattggcaggtaatgaccctgaaggtcgtgttgctcacggttgttacatctccaatgctgctttagccaagggtattgatggttctgcgcttgccaaaaaggtgtccagtatcatcggcggtaaggctggtggtaaaggtaatgttttccaaggtatgggtgataaaccagccgctataaaggatgcagttgatgatttggaaagtttgttcaaggagaagctttccatttaagaagttaaaataaaacgaaaaataatgcataggagttctttttgtttattttgctcttaataaaaaagtgtcattgtataattagtcttagtttaattatttatgttttta

SEQ ID NO: 2714 - DNA, 519 bp, Saccharomyces cerevisiae
agtgaatagtatctgtaagtcaggcatacattcgaaacacttccaaatacaaaataagaacgcgcaacgatgtcgtcatcagtgccatacgatccatatgtgcctccagaggagagtaactcaggcgcaaacccaaattcccaaaacaagactgctgctttgagacaagagattgatgacacggtgggaataatgagagataatatcaacaaggttgctgaacgtggtgaaaggctaacatccattgaggacaaagctgataacttggctatctccgcacaaggattcaagagaggcgccaacagggtcagaaagcaaatgtggtggaaagatctaaaaatgagaatgtgtttattcttagttgttattattttactagtggtaattatcgttcctatcgtcgtccatttcagctaacgctcatcggttcccgatgctaattctaaaaaatatatacagtagtcataatagtaataataatataatcataatttataaattcagtaagaagcaaaatgt

SEQ ID NO: 2715 - DNA, 1434 bp, Saccharomyces cerevisiae
caggcaaccaatataaagatgtccagttcacaacaaatagccaaaaatgcccgtaaagcagggaatattttgaaaaccatctcaaacgagggcagatcagatattttatacaaaattcacgatgccctgaaggctaatgcgcatgccattgaagaagcgaataaaatcgatttagctgttgccaaagagactggcctagcggattctttattgaaacgtctcgacctatttaaaggggacaaatttgaagttatgttacaaggtattaaggatgtagccgaactagaagaccctgttggcaaggttaaaatggccagggaattagatgatggcttgacgttgtaccaagtaaccgctccagtcggcgttttgttagttatctttgaatcccgtccagaagttattgccaatattaccgcattgagtatcaagtctggtaatgctgcaattttgaagggtggtaaagagtctgtgaacacgttcagagaaatggcaaagatcgttaacgacaccattgcacaattccaaagtgagactggtgttcctgtgggctctgtgcaattgatcgaaaccagacaggatgtttccgacttgttggatcaagatgagtacatcgacttagttgttcctcgtggttccaatgccttagtcagaaaaatcaaggacactacaaaaattcccgtgttgggtcatgcggatggtatctgctcaatttacttggatgaagacgcagatttgattaaggcaaaaagaattagtttggatgcaaagactaactacccagctggttgcaacgctatggaaacgttgttgattaacccaaaattctctaagtggtgggaagttctggaaaacttaactttggaaggcggagtgactatccacgctacaaaagatttgaaaactgcgtattttgataaactgaatgagttagggaaattgacagaagcaattcaatgcaaaaccgttgatgctgatgaggagcaagattttgataaggaatttttatccttggatttggctgccaagtttgttacatctacagaatcggccattcaacatataaatacacactcttcgagacataccgacgctattgtaacggaaaataaagcaaacgctgaaaaatttatgaagggtgtcgactcctctggtgtttactggaatgcatcaactagatttgccgatggtttcaggtacggttttggtgctgaagtgggtatttctacctctaagattcacgcccgtggtccagttggcttggacggtctggtgagttatcaataccaaataagaggtgacggccaggttgctagtgactaccttggtgctggtggtaacaaagcttttgttcacaaggatttagatataaagactgtgacattataaaaatttttaggataaagctaagttccatgtatgaaggacgtgtat

SEQ ID NO: 2716 - DNA, 2820 bp, Saccharomyces cerevisiae
ataggcagtttttactagggctccgaatactttgaataataaggttgattaagtttgtgtgcttcatccaattagctttcagttttccttatttaagcttctgatttcggaatcaaaagttgagcaacgttatagcttgctttttcggaggagaacgctgttgttcacatttcaacaccagaaattgctgatttttactcctacttagtatacatttcactaaacaatacgttttaccatggcattttcacgtcttacatctactcatcagtccaatcataacggctacagtaatagcaacaaaaaaggacaaagtcttccactaaccctttctattgatgtagaatcaccgccatgtgttctttatgggtctgctatggaatcctcaggtgctgtgctaagtggactttttactgtgacggttgtcgatccctacagtagtgctgaagataaatctttaaagaatacagaatctaatgtgtcgactacttctaaaagcctaaaaagaaagagtacatttggttctgcactttcatctagattgtccagcttgtcagcgtcgacgtcaaatatctctccttcaacatcttctacatccatatcgcattctcccacgcctgctaatttaagaataatggctggttataccaagatcaccattacgtcggtaacactaagtttggtacagaagatccatttccataaaccctttgtgcctaatatttcctcaatgcaaacctgtatgaactgtaaaacaaagattacaaacatgaaaagctgggaaattcagagtaatacccaggatctttctgttggaagccactcttacccattttcctatcttataccggggtctgtcccatgttcttcatcgctaggtgctacggctgaaacccaggtcaaatacgaacttatcgctgttgtgacgtatatagatcctcatagaaattccttttcttccggtcattctactcccaggaaagaaggaagctcttctaagaagcggttgttgcaactagcgatgcccatcgccgtgactcgaagtataccgcgcgggcctgataagaattctctaagagtatttcctcctacagagttaactgctgctgctgttcttcctaatgttgtatatcctaaatctacttttcctttggagatgaaattagacggtgtttcttcgggggataggagatggcgaatgcgtaaattgagttggagaattgaagaaactacaagagttaaagcacatgcttgtccagtgcacaagcatgaattgaggcagttagaagagcaggttaaaataaaagagtcagaaaaaagtaaaaagccacgcagtcatattaagcgttatggtgaactaggcccacaaatccgggttgcagtaaactctttagaaaatatgccgtcgcaaaggcttccaggcgagcccggtcgtgaacaagcacctaattcttcgggtccagcgtcaactggtaatgttggacttgatgatgaaaatcctgttaatgaagatgaggaagaccaacccggtagcgaattcatccatcccagtgacgacgctttgcgtcaggagttactaatgcagcaacaacgcgcaagacaacaacaacttcaacaagagctaaaaaacaacagtagtttatttacggaagaggttcggataatatctaagggagaaatgaagagtggatggaaaaccgattttgacaataatggaaagattgagctagttacagaaatagattgtatgggacttaattcaggcgtctctaatccggtaatgcatgcatcgacactacaaactccttccacgggcaataagaagcccagcatcaatgtggcttgcgatatacaggatccaaatttaggtttgtatgtaagccacatcttggcagtggaaatagttgttgcagaagaaacattgcaatatgccaatgggcaacctatacggaaaccaaactccaaaaacaagaaagaaactaataacaatacgatgaatgttcataatcctgatcaacgcttagctgaattatctccaatttttgcaaatagaaatacaccgaaagtacggcgcatggggcctgaagatataacaccggtgaatagtaataagtccaaccatagtactaataaggagaaggcatctaacggtgctagtaactctaatatagtgagtgttcccactggtgcagcacgtgttttaagaatgcaattcagattaacagtcactgaaagatctggacttggaatctcctgggacgaagaagttcctcccatttaccaagatgtcgagttgctctcgccaccatgttacgagctctctataaataatggaatcaaaaataaactttattcaacaatgagtactcctgttagatcagaggatgattttgtgggcggcagcgatgaagatattgggaactatgagagccaagggctcgaacctggtcctaacgtacaggaagtaacgatcacacaaaataaattaacgataccaccaaccgcacatcactaccagcctgcttcctcttcgcaaagatcccttaccacagtacagtcaccaccactggaaagtgttgttagtgtccagggtagtgtaccttttcgtggacatgtgttgacaccacatagcacaagagatatcagaatacaaaacttttccgattttctagattccaatagaataacccagtagattttataatattcgttaaaggtatttaccatatatttttatcttagatacctgaaaactacaaatctgatcaataagcaaaccctgaccatgatttgatgcatttcacagataactacatacag

SEQ ID NO: 2717 - DNA, 1721 bp, Saccharomyces cerevisiae
gtcgaaatcaccgggaaacaaataccgaccacttgtggacaacattgtgacattatttgctaaactgtatacttcggaactatcattccaattatgaggttgatatccaaaagaagaatcagatttattgtgtttattttgttcggcgtcctcactgtattcgtagtatcaagacttgttgttcattttcagtataaccaagaaataaagttctataaaaagtattttcaacagaggaaggatgggcttcacgaaatttacaacccattagaaatcaagcaaatacccaaggaaacgatagatgacttatataccgcccgtttagataaagagttgaaaaacggtgaggtcatcgagtggtccaagtttgcatacgtgaattatgtgactaatgctgattatctttgtaatacgctgatcatattcaatgatctgaaacaggagtttgagacaaaggccaagttagttcttctgatatctaaagatctgctagacccaaacacttcctcaaatgtggcttacattagttcactccttaacaagattcaagctatagatgaggaccaggtagttatcaagttgatagataacattgtgaagccaaaggatactacaccttggaatgaaagtttaacaaaattactagtatttaaccaaacagaatttgaccgtgtgatttatcttgacaacgacgcaattttaagatcaagcttggacgaattatttttcctaccaaattatatcaaatttgcagctccattaacatactggtttttatctaacagtgatttggaaaaatcataccatgaaacgcgacaccgtgaaaagcaaccaatcaacctccagtcgtatacaaaagtgctgactaaaagaattgggaaaggtcagatgatttataatcatttgccgagtttgccgcattcattgtacttgaattctaataacatagctcaggacattataagttctacatcatctttatcgccgttatttgatttccaaagtagtaaaaaggttggaaaattaaaatttgcttctaatttaatggttattaatccttcaaaggaggcgtttgatgaaattgtgaacgttatgctgcccaagattttaaacaagaaggaaaagtacgatatggatttgatcaatgaagaaatgtacaatttaaagaagattatttataaacagtttattttcttcagaaaagtccgaaaacttttcaaaccagaagtattggttttgccatttgcaaggtacggcttactgacgggttcattgagaaacccacggcactattctataatctataatgacgttttgggttataagacattggataatgatggcaacgatattccggtaggattaaacgacagtgtcgcatattctaagtacatacatttttcggattatccattggccaagccctggaattatccatcaatgaaggagtttgaatgtatcgttaaagaagaagacgcggaggattcaaagctagagcaccaagcttgtgacctttggaactcggtgtacgcttcttacatacagtccagggaaatctgcctcgtttgattatgaggagaagtgaaaattttcaaaaagtgtaaaaattagtatagtcggaaacgcatatatatatatcatagtattgataatgtttctgccaagattgtgtccgttatcgcattttctaacgggtaaggtatgtactaggtgagagcggg

SEQ ID NO: 2718 - DNA, 1565 bp, Saccharomyces cerevisiae
attggtcttatatattctacgtgggagctcgaaaagcatttctggttctatttagtaaccaattattttcactttgctcagaatagttctgcatagctatagaaagaaagttaacacaaagtacggaaagattgagtaaatatgaaactcggaagcaaacaggtaaaaattatatccttgttgctgctagacacagtgttcttcgggatcgagataactaccgggtacttgtctcactctttggctctaatcgcggactcattccatatgctaaacgatataatttctcttgtggttgcactttgggccgtaaatgttgccaaaaacagaaatccggattcaacgtacacttatggttggaaaagggcggagattttgggtgctctgattaacgccgtctttttgattgccttatgtgtctcaattttgatagaagcgctacaaagaattattgctccccccgtgattgaaaatcctaagtttgtgttgtatgtgggtgtcgcagggttgatatcgaacaccgttggacttttcttatttcacgacaatgatcaagagcatggacatggacacggacattcccatggcggtatctttgccgaccatgagatgcatatgccatcatcccacacacatacacatgcccatgttgatggaatagagaatactacaccaatggatagtacggataacattagtgagattatgcctaatgctatagtagatagttttatgaacgaaaatactagattattgacaccggaaaatgcatccaagacgccatcatactcaacgtcaagccatacgattgccagcggcggaaattacacagaacacaacaagcgcaagagatctttaaatatgcatggtgtgtttcttcacgttttgggcgatgctcttggcaacatcggcgttatgttgtctgcatttttcatttggaagaccgactattcttggaagtattatacagatccgcttgtctcattgataattaccggtataattttttcctctgcgcttcctctatcgtgcaaggcttccaaaatattgttacaagcgacaccttccactttatccggcgatcaagtagaaggtgatcttttgaaaataccaggaataatagctattcatgatttccatatttggaatttaacagagtctatttttattgcatctttgcatattcaactagatatcagcccggaacaatttactgacctggccaaaatagttagatcaaaacttcaccgctatggcattcactccgctactttgcaacctgaatttattaccagagaggttacttcaaccgaaagagccggagactcccaaggtgatcatctacaaaatgacccgctttcattaaggccaaagacatatggtactggcatttcaggttccacttgtcttatcgacgacgctgccaactgcaacacagctgattgcttagaggatcattaaaaggactttataacgaaaaagcgtgaagaattaaatacttttaaaaatcgttatacggtacatatacatacacacacacacatatatatagtcgtctataatgt

SEQ ID NO: 2719 - DNA, 588 bp, Saccharomyces cerevisiae
tcaagcaaagaaaaatggctcatttcaaagaataccaagtcattggtcgtcgtttaccaactgaatccgttccagaaccaaagttgttcagaatgagaatttttgcttcaaatgaagtcatcgccaagtctcgttactggtatttcttgcaaaaattgcacaaggttaagaaggcttctggtgaaattgtttccatcaaccaaatcaacgaagctcacccaaccaaggtcaagaacttcggtgtttgggttagatacgattccagatctggtactcacaacatgtacaaggaaatcagagacgtatccagagttgctgccgtcgaaaccttataccaagacatggctgctagacacagagctagatttagatctattcacatcttgaaggttgctgaaattgaaaagactgctgatgtcaagagacaatacgtcaagcaattcttgaccaaggatttaaaattcccattacctcacagagtccaaaaatctaccaagactttctcttacaagagaccatcaaccttctactaagccaacaagatatttctacgttttttagtataataaaattttgtataattcattt

SEQ ID NO: 2720 - DNA, 935 bp, Saccharomyces cerevisiae
agatatctacgcatttctgtcatttggattcatacagggtttacagacaatatggggaccgaagatgccattgcccttccaaatagcacgctagagccgcgtaccgaagctaagcaaagactatcatctaagagtcatcaagtctcggcgaaagtaacgattccagcaaaagaagaaattagtagtagcgatgacgatgcacacgttccagtgacagaaatacatttgaaatctcatgaatggttcggcgattttataactaaacatgaaattccccgtaaggtgttccattcttccattggctttattactttgtacctgtatacgcagggtattaattataaaaatgttttatggcctttgatatacgccttcatcatattgtttattttggatctgataagactaaactggccctttttcaatatgctttactgtagaactgtgggtgcgctaatgagaaaaaaggagattcatacatacaatggggtattgtggtacattcttgggttaatcttttcttttaactttttctctaaagatgttaccttaatatcgttatttttgctaagttggtccgatacagccgccgcaactattggaagaaagtatggtcatttaacacccaaagtggcaagaaataaatcccttgcaggttcgatagctgcgtttacagttggtgttatcacctgctgggtattttatggctattttgttcctgcctacagctacgtcaacaaacctggcgagatccaatggagcccagaaacaagcagattaagtttgaatatgctatccttgttaggtggtgtggtagctgctttgagtgaaggtatagatttgttcaactgggatgataatttcactattcctgtcctgtcatcactttttatgaacgcagtaatcaaaacattcaagaaataaaagcatatata

SEQ ID NO: 2721 - DNA, 1637 bp, Saccharomyces cerevisiae
agaacctcaacctcctcatacaatggcttacgttttaactgaaacttcagctggttatgctcttttaaaagcttccgataagaaaatctacaaatcttcaagcttaattcaagacttggatagctctgacaaagtcttgaaggaattcaagatcgccgccttttccaagttcaactctgcagctaacgctttagaggaagccaactccattattgaaggtaaagtttcttcccaattagaaaaacttctggaagaaattaaaaaggacaagaagtcgaccttgattgttagtgaaactaaactggcaaacgctattaataagttgggattgaacttcaatgttgtttccgatgctgtaaccttagatatctatagagctatcaaagaatatttgccagaattgctgccaggtatgtctgataatgatctaagcaagatgtctttgggtttagctcattccatcggtcgtcacaaattaaaattttctgctgacaaagttgatgttatgattattcaagcaattgctttattggatgatttagataaagaattaaacacatatgccatgagatgtaaagaatggtacgggtggcactttcctgagttagctaagattgttactgattccgtcgcttatgcgagaattattctaacaatgggtatcagatccaaggcttctgaaacagatttgagtgaaatcttaccagaagagattgaagaacgtgtcaaaaccgctgctgaagtgtctatgggtactgaaatcactcaaaccgatctagacaacattaatgctttagctgaacaaatagtcgaatttgccgcttacagagaacagttgtccaattacttgtctgcaagaatgaaggctattgctccaaacttgactcagttggttggtgaattagttggtgctagacttatcgctcattcaggttccttaatttccttggccaaatcaccagcttctaccatccaaatattaggtgccgaaaaggctttattcagagctttaaagaccaagcatgatacaccaaagtatggtttgctatatcatgcctctcttgttggtcaagctactggtaagaacaaaggtaagattgcaagagttctggctgctaaggccgctgtctcattgcgttatgatgctttagctgaagatagagacgattcaggtgacattggtctagaatcaagagccaaagtagaaaatagattatcccaattagaaggtagagatttaagaactactccaaaggttgttcgtgaggctaagaaggtggaaatgactgaagctagggcctacaatgcagatgctgataccgcaaaggctgcttctgattctgaatccgattctgatgatgaagaggaagaaaagaaagaaaagaaagaaaagaagagaaagagagacgatgatgaagattccaaggattctaaaaaagctaagaaggaaaagaaggacaagaaggaaaagaaggaaaagaaggaaaagaaggagaagaaagagaagaaagagaagaaggaaaagaagtccaagaaagagaagaaagagaagaaataaggatgcattttacattttaataattagtgacccctcgcgttcccttttatttggatttagaaaattttctataattatc

SEQ ID NO: 2722 - DNA, 1639 bp, Saccharomyces cerevisiae
atatctgtattcataaagaggagaaaaaagaataaagaaaaaaaagaaaagaacattagactacacgtgcagcatataccaactatttttattatatgcttatatatgcaaagcttacgatatttagagagtaagtggattgacgataaaagtgtttaataaggagccattcgtttttataaaggagaaacaataccggcctaacatgattcaaacgcaaagtacagcgatcaaacgacgtaattctgttcataaaaacctctttgatccatcactgtatcaaataccagaaccaccacgtggggggttccaacaccaaaaaaaagaatacagtaaggagacattcagtaatcaagtctttggatatgatattactagccttaaaaaaagattcacgcaactatttcctagtaatatacaagggtacttacctgaagttgacctaagaataaccattatttgttctatatggtacgtcacgtcatctatttcaagtaacctatctaaagccattttaagaactttcaaccatcccatagctctcacagaattgcaatttcttgttagtgctgttctatgtgttggatttgcttccatcgtaaatttattccgactacctcgtttgaagcatacgaagttttcaaaggcactcaatagtttccctgacggtatccttcctgaatatctcgatggcaatttcaggagttctatcctgcacaagtttttagttccctcaaagctggttttgatgaccactttccctatgggaatattccaatttattggtcatatcacatcgcacaaggcggtatctatgataccagtatcactagtgcattccgtgaaggcattatccccaataataacagttggctactataaatttttcgaacatcgttattacaattccatgacttattataccttgttacttttaatttttggcgttatgactacttgctggtcaacacatggcagtaagagggcttcagataacaaaagcggatcttcattaatcgggttgctttttgcctttatttccatgataatatttgtagcacagaatatttttgcaaagaatattttaaccatcagaaggaaggtaggaatactgccgtcttcttctacggatgacgtcacgtcgaaggaagggcaaccgagtctagacaaaacaagattttctccattgcaagtggataagattaccatattgttctactgctcctgcattgggttttctttaaccctattaccttttttaaccggcgaattaatgcatggcggtagcgttatcaacgatttaacgctagaaacagtagcccttgtagcgattcatggaatagcccattttttccaagcaatgcttgctttccagttgatcggtttactatcttccattaattattcggtagcaaacatcatgaagaggattgttgttatatccgtggcactcttttgggaaacaaagttaaatttttttcaggtgtttggtgttatcttgacaattgccggattgtacggttatgacaaatgggggctttccaaaaaagatggacgtcaggcataatatgaagtaatactattgagtacaaaccatcattcaaggtaggacacttagtactatatcaaatatataatc

SEQ ID NO: 2723 - DNA, 1842 bp, Saccharomyces cerevisiae
cagtagttacggggactagatatataaactgcttgatgtacgtttggaaattctcaaatagcaattctctcttcaaagttagtgaaggataggttatatctgtaaaaacatactaagatctgaataactaagatcacgggggcatactatcgattaaaaagctctgattttactatagattaaaaagaaaaataatgagctcagacagtttaacgcctaaagacactatagttccagaagaacaaaccaaccaactgcggcaacctgatttagatgaggatagcatacattatgatccagaagctgatgatttagagtcattagagactactgcctcttacgcgtcaacgtcggtgtcggcaaaggtgtataccaagaaggaagtaaataaaggaactgacattgaaagccaaccacattggggtgaaaatacctcgagcacgcacgacagtgacaaagaagaagattccaatgaagaaattgaaagcttcccggagggtggattcaaggcttgggttgtgacatttggttgcttcttgggtctaattgcatgctttggtttattaaactcaacgggggtcatagaaagtcatctacaggacaatcaattatccagtgaaagtgtttctaccattggttggctgttttctttgtttctttttgtttgctctgcctcatgtatcattagtggtacttactttgatagaaatggatttaggacaattatgattgtgggcacggtttttcatgtagccggtctgttcgctaccgccaactctactaaatattggcacttcatactgtcctttgccattgtctgcgggttcggtaatggtattgtactgagtcccctagtaagtgttcccgcccactatttttttaagagacgtggtactgcattggcaatggccactattggtggtagtgtgggtggcgtcgttttcccaattatgttgcgtagtttcttctctatgaagtcagacactgatccaacttatggatttgtttggggcattagaactttaggatttttagatttggctttgctaactctgtcaatcattttagtcaaagagaggttaccacatgttatcgaaaattccaaagatggtgagtcacgttggagatacatactcagagtttatattctgcaatgttttgatgcgaaggctttcctggatatgaaatatcttttttgtgtcctgggaacggtatttagtgagttatccattaattcagctcttacttattatggatcatacgccaccagccatggaatttctgctaatgacgcctacaccttgattatgattataaatgtctgcggcatacccgggagatgggttcctggctatttgagcgataagttcggtaggtttaacgtcgcaattgcaactctactcactctatttatcgtcatgtttgttggttggttaccatttggtaccaatttgacaaatatgtacgttattagtgccctatatggattttgttctggaagcgttttctccttacttcctgtttgctgtggccagatatctaaaacggaagagttcggtaaacgttactctacaatgtacttcgttgtcggtttcggtactttagtcggcattccgataacaggtgccattatctctatcaagacaacggccgattaccaacactatattattttttccggtttggcaacttttgtaagcgctgtttgctacataatttcgagagcatactgtgttggcttcaagtgggtcagattttaaaaagtaagacagtgccctttatagatcttcaaaaaagtaatgcaataatattttcttttaggaaatgtgtagatagactatt

SEQ ID NO: 2724 - DNA, 709 bp, Saccharomyces cerevisiae
gctaataagctagaaaacaaaaaagttaacgagcaaaatcgtaaagaaaaatgtctgactgggatacaaatactattattggtagcagagcaagagctggtggttctggcccaagggccaacgttgccagatctcaaggccaaattaatgctgcaagaagacaggggttggttgtttccgttgacaagaagtacggatcaaccaatacgaggggtgacaacgagggtcagaggttgaccaaggtcgaccgtgagacagatattgtcaaacccaagaaattggatccaaatgtcggtagggccatctcgcgtgccagaacagacaagaaaatgtcgcagaaggatttggcaaccaaaattaacgaaaagccaaccgtggtaaacgattatgaagccgctagagctattccaaaccaacaagttttgtctaagttggaaagagccttaggcgttaaattgagaggtaacaacatcggttcgcctttgggagctccaaagaagaaatgaagaggtcttctttcatttgttcctttcttttcgcactgcatgtcatcaatgaagcattcttaataatgtacattattctatcatgatcgttttatggtttttttcgtttattttatcatttttttttttttttagctttttttcctctatagaaagtgaagtacacacgtatatattatgattcaggatctttatttggtctc

SEQ ID NO: 2725 - DNA, 752 bp, Saccharomyces cerevisiae
gcacacattaattaacggtgatgcgaggtgcaacaactgagtaatttaatacctttggtaatgctattgtttcctggcttgaagcctgttcttaatgcttccactgtcattgtaaatcctgtacgagctgtttttccaggattagtactttcaaccaaaagatccttttatagcattaatcgtttaaatgctgaaaataaaataaacgatattgcaaatacgtcaaaagaggcatcctcttcagtgcagatgtttaagcccccagagttctctcaatttaaggactcttatcaaaaagactatgagagaatagcaaaatatactttgattccattaacaatggtacctttttatgcctcctttaccggcggggttataaatcctttactcgatgcgtctttatcgtccatttttttgatatatttacagtatggcttcacaagttgtattattgactatataccgaagggaaagtatccaagatggcataagctcgccctttattgcctctatggaggatccatgttgtccctgtacggtatctacgaattggaaacgaaaaataatggttttgttgacctggtaaagaaactttggaatgaaaatgatgaccatttgtatatatttggaagaaactgactcacccatactttttctttttttttgcatttctaagatttcatttttagagtcagattccccatgaacttaacttaggagagattttataaaaagacaaataagcaataaaa

SEQ ID NO: 2726 - DNA, 987 bp, Saccharomyces cerevisiae
gaaagttttttcaattctgtagatgcctcttcaactttttggcagggatcagatcgttgtacattatgataacggcaacatgagtaacgatgaccagaatcaccaaagtgttctcggatcttggacaagaagggcagcagcagcattaagaacgttaatgaacaagcgaatacaacgtataacacttacgcactggttgctgttagtcatatgggttactagcctatggaaatttaccagtcattatagacagctgtatgctaattctgctgtttttgcaactttatgcacgaacattcttttatttgggatatctgacatactagcacaaagtatagcctgcttttattcatatcacgtggaccctataccgcaaatacttaacgatacctttcatcatgttcagaacaaccgtgatgtagaaaatggaggaggttatgaaagtgatgagctatctatcttcaatgattttacctcggaacatagctcctacacggataacgacgactatcctgaacttgataggccattagctactttcaaaacggacacatttgacttcttcaggtgggggtgttttatgttctggggattttttatatcatttttccaggctccttggtacaagttcttgaatttcttttacactgaagatccgacagtggtacaggtttttgaaagggttctttcggatcagctcctttattcgccaatctctctctattgtttctttatgttctcaaactatgtgatggaaggtggagataaggacacccttggcaagaaaatccaaaggctatatatatctacgcttggttgtaactatctggtgtggccaatggtacaattcattaatttccttataatgcctagagatttccaagcaccttttagctcttcagttggagtggtatggaattgcttcctttcgatgagaaatgcgtctaaatagtaataattttaattatagaacatggtacttgtaca

SEQ ID NO: 2727 - DNA, 1053 bp, Saccharomyces cerevisiae
ttaacacaattaggagagacaaaatttgacatataatgttatttcttaatattattaagctccttttgggactttttattatgaatgaagtaaaggcgcaaaacttttacgattccgatcctcatatatcagagttaacgccaaaaagcttcgataaagcgatccataacacaaattacacatcattagtggaattttatgctccgtggtgcggccattgtaagaagctctctagtacgttccgcaaggcagcaaaaagattggatggtgtagtccaagttgctgctgtaaactgtgaccttaacaagaataaggctttgtgtgctaaatacgacgtaaacggatttcccacgttaatggtatttaggcccccaaaaattgacctatctaagccaatagataacgccaaaaaaagtttcagcgctcatgccaatgaagtgtactcaggtgcaagaactctcgcgcctattgttgatttttctctttcaagaataaggtcatatgtcaaaaagtttgtccgtatagatacacttggctctttacttagaaagtcacccaaactttccgtggtgttgttttccaaacaagacaaaatttcaccggtttataaaagcattgcccttgattggttaggaaagttcgatttttattcaatttcaaacaaaaaactcaagcaactaaccgatatgaacccaacatatgaaaaaactcctgagattttcaaatatttgcagaaggtcattcctgaacagcgacagagcgataaaagtaagcttgtcgtttttgatgcagacaaagataaattttgggagtatgaagggaactcaatcaacaaaaatgacatttccaaatttctgcgggacacttttagtattacccccaatgagggtccttttagtagacgttctgaatatattgcttacttaaaaactggcaagaagccaattaaaaagaaccattcctcctcaggaaacaagcacgacgaattgtagtggtacgtttcctcattcaatgattatctaattaaacacaacatatgtatctatatagtcc

SEQ ID NO: 2728 - DNA, 904 bp, Saccharomyces cerevisiae
ttttcaaactgaattctaccacaaaccccagaattattattatgagtgaaaagaagaaagttctaatgctacatggttttgtccaatccgataagatattttctgcgaagactggaggattacgaaagaatttgaagaagttaggttacgatttatactatccttgcgccccacattcaattgataaaaaagcgttattccaatcagagtcagaaaagggtagagatgctgcgaaggaattcaacacctcagcgactagtgatgaagtatacgggtggttctttagaaatcccgaatctttcaattcctttcaaatagatcaaaaggtgtttaactatttacgtaactacgtgctagaaaatggaccatttgatggtgtcattggattcagccaaggtgcaggtcttgggggctacttagtcactgactttaacagaatattaaatcttactgatgaacaacagcccgctttaaaattttttatttcatttagtggattcaaattagaagatcaatcctaccagaaagaatatcataggattatccaggtgccctctctacatgtaaggggggagttagatgaagttgtagcagaatctagaatcatggcattgtacgagtcatggcccgataacaaaaggacattgttggttcatcctggagcccattttgtcccaaactcgaaaccattcgtatcccaagtttgcaattggatccaaggaattactagcaaagagggtcaagagcataatgcccaacctgaagtagatcggaaacaatttgacaaacctcaattggaagatgatttgttagatatgatcgattccttgggtaaattgtaattcgataattgatatttatatgagctacatacaatttttataaaactattgaaaatatcgac

SEQ ID NO: 2729 - DNA, 2190 bp, Saccharomyces cerevisiae
ttcctgaaaattacagaataaagataccatcttatacacacacatacacacacaaagaagcatagacatcgtatacatatattttaagttttactaatgccttcttctttgacaaaaaccgaatctaactcagatcctcgaacaaacatacagcaggtaccaaaagccttggacaaaaatgtaactaatagcggcaacttggattcgacttcttcttcgacagggtcaataacagaggacgaaaaaagatcagaaccgaatgcagattccaataacatgacagggggcgagccaattgacccaagagatctcgattgggacgggcccgatgacccagacaatccgcataattggtcctctttgaagaaatggtatactactatgacttcagcttttctttgtttggtcgtcacaatgggtagttccctatatgtttcttccgtaccagaattggtagaaagatatcacgttagtcagactttggcgcttgctggtttaactttctatcttctgggtttatcgactgtcatcggcgctccattaagtgaagtgtttggtcgtaagcctgtctatttattttccctacctgtgtcaatgcttttcaccatgggtgttgggttatccaatggccacatgagaataattctacccctaaggtttttatcaggtgtctttgcatcccccgccttatccgttggatcaggtaccatcctggatatctttgacgtggaccaggtctccgtcgcaatgacatactttgttctatctccattcttagggccagttttatctcctattatggcaggatttgctactgaagccaaaggctggcgttggtctgaatggatccaattgattgcgggcggtctaatcttgccatttattgcgctcatgccagagacccataaaggtattattttaagaaagcgtgccaagaagagaaatatagccttgaagaagttcagcagggaagctcagaaagaatttttaaaaaccactgtcactattacaatcttaaggcctttaaaaatgcttgtcgttgaacctattgtatttgttttcagtgtttatgtcgctttcatattcgccattttatttggatttttcgaagcatacgctgtcatttatcgtggtgtttaccacatgtctatggggatatctggcttgccatttattggtattggtgtcgggttatggataggtgctttcttttacctttacatcgacagaaaatatctcttccctaaaccaccagctggcactcaaccactcaccgaaaaagagagaacttctaaaaggactaccccttacagaggtgcaagagacgctgaaacaggtgaattgctacccgttgttccagaaaaatttttaattgcctgtaaatttggttctgtagctttgcctatcggcctgttttggcaagcctggactgctagatcagatgtccactggatggctcctgtggctgccggtgtgccatttggttttggtttaattttgatttttttcagcgttttaatgtacttctctacatgctatccgccattaactgtggcatcctgtttggctgccaataatctattaagatacgttatgagtagtgtattcccattgtttaccatccaaatgtacacaaagatgaaaatcaaatgggcaagcactttatttgcattagtttgcgttgtgatgattccaattccatgggtttttgaaaaatgggggagcaaattaagacacaagtcacaatttggttatgccgccatggaaaaggaggctgagaccgaaggtggtatagatgacgtaaatgctgtcgatggtgaattgaatctaacaaggatgaccacgttaaggaccatggaaacagacccttcgactagagaaaaaccaggtgaaaggctatctctgcgcaggacccatacgcagcccgttcctgcctcgtttgatcgcgaggacgggcaacatgcgcaaaatcgtaatgaacccatttccaatagtttatactcagctatcaaggataatgaagacggttattcgtatacggaaatggccaccgatgcttccgccagaatggtttgaaaaggtcttaagacagatcacaattgcatatattcaaatagtaaattgggggatagctggataaaattcaccaatttaaatttatagaagtttcatacaagtacacattatcat

SEQ ID NO: 2730 - DNA, 1106 bp, Saccharomyces cerevisiae
cgaccactgcaagttagcaataataaaaccacacagcatcgaaagaaaaaaataaacaaggcagagaaatatggcatcatcagtcccagggcccatcgatttgcccgaatcccgctatgacttatccacgtattggggtagaatccgccattgcgcagagatttccgaccccactatgttgttaactactgagaaggacctggcgcatgctagagaaatcatcagtgcgtatcgtcacggtgaactaaaagagactactccggagttctggcgagccaagaaacaactggactccaccgtgcatccggacacagggaagacagttcttttgcccttccgtatgtcttccaacgtgctatcaaacctagtcgttactgtaggtatgctgacgcctggtttgggtacggcagggactgtattttggcaatgggcaaatcaatcgctaaacgtcgccgttaattccgctaacgcaaacaaatctcatcctatgtccacgtcccaattgctcaccaattacgctgccgctgtaactgcgtcgtgtggtgttgcgttaggtctaaataacctagttcccaggttgaaaaacatttctccacattcaaagttgatcttgggccgtttggtgccatttgccgccgtggtcagtgccggtattgtcaacgtcttcctaatgagaggcaacgaaattagaaagggtatttctgtgtttgactctaacggtgacgaagtcggaaagtccaagaaggctgccttcatggcagttggtgaaactgcattaagtagagtgattaacgccactccaactatggtcatcccacctttgattttggttagactacaacgcggtgtcctcaaaggtaagtctctcggtgtgcaaactttggccaatttggggttgatctcagtcacaatgttctcagctttgccatttgcactcggtatcttccctcaaagacaagcaatccatttaaataaactagaacctgaactacatggcaagaaggataaggatgggaagccaattgaaaaggtctattttaacagaggtatttagaagtgaagagacaaatttatatagttatagaataaatatcagatagataaga

SEQ ID NO: 2731 - DNA, 2792 bp, Saccharomyces cerevisiae
ccatagcttttgcctctcaatatatctatacttgcttagagggctacctgtgtgtatttgctagcttttacctttctctatacaacaagtgagggtttgaacttttaaatcccttttaatttgaatcaaaaaaaaaacatttaaaggttacacaaggaaaataatggcagagaaggaggaagcgatttttcgctctgctgaaatggctttagtccaattctatattcctcaagaaatttcaagagactctgcttacactttaggtcaattgggtcttgttcaattccgtgacttgaactctaaggtgcgtgcgtttcaaagaactttcgtgaacgaaattagaagactggataatgtagaaagacagtatcgttacttttattctcttttgaagaaacacgatattaagctctacgaaggagacacggacaaatatttggacggctcaggtgaattgtacgttccaccaagcggttcagtgatagatgattatgtccggaacgcttcatatttggaagaaagattgattcaaatggaggatgcaaccgatcaaattgaagtccagaaaaatgacttggaacagtatcgctttattttgcagtcaggtgatgaatttttcttgaagggtgataataccgacagcacttcctatatggatgaagacatgatcgacgctaatggggaaaacattgctgctgctatcggtgcttctgtaaactatgtcactggtgtcattgctagagacaaagttgccaccttagaacaaattctttggagagtattaagaggtaaccttttcttcaaaactgttgaaattgaacaacctgtttatgatgtcaaaaccagggagtataaacataaaaatgcttttatcgtattttctcacggtgatctgattattaaaagaatcagaaagattgcggaatcattggatgccaatctttacgatgttgactcttccaacgagggtagatcacaacaattggccaaggtcaacaagaatttgagtgatttgtacacagttttgaaaaccacttctaccactttagaaagtgaattatatgccattgccaaagaattggactcttggttccaagatgttacccgtgaaaaggcgatttttgaaattttgaacaagtctaactatgataccaatagaaagattttgattgctgaaggttggataccaagagacgaattggctactttgcaagctcgtcttggtgaaatgatcgcaagattgggtattgatgtcccatccattatccaagtcctggatacaaaccacactccacctaccttccacagaactaacaagtttactgctggtttccaaagtatctgtgactgttacggtattgctcagtacagagaaatcaatgctggtttacccacaattgtcactttccctttcatgtttgccatcatgtttggtgatatgggtcacgggttcttaatgaccttagccgcattgtctcttgtattgaatgaaaagaaaatcaacaaaatgaaaagaggcgaaattttcgatatggccttcactggtagatacattattttgttgatgggtgtcttttccatgtacacaggtttcctttacaacgatatcttctctaaaactatgactattttcaagtctggttggaaatggcctgatcattggaaaaaaggtgagagtattactgctacatcggtgggtacataccctatcggtttagattgggcttggcatggaactgaaaatgctttgttattttctaattcttacaaaatgaaactatcaattttaatggggttcatccacatgacctattcttatttcttttcgttggctaaccacctatactttaactctatgattgatatcatcggtaactttattcctggtttgctatttatgcaaggtatctttggttatctttccgtttgtattgtttacaaatgggctgttgattgggttaaggacggaaagcctgctccaggtttgttaaatatgttgatcaacatgtttttatcaccaggaactattgacgatgaattataccctcatcaagcaaaggtccaagtgtttttgttgttgatggccttggtttgtattccttggttgctattggtgaagccattacatttcaaattcactcataaaaagaaatctcacgaaccactgccatcgactgaagcagatgctagttctgaagatttggaagcacaacaattaatttccgcgatggacgccgatgacgctgaagaagaagaagttggttctggatctcatggtgaagactttggtgatattatgattcatcaagttattcatacaattgaattctgtttgaattgtgtttcgcacactgcatcctatttacgtttatgggccttatcattggcacatgctcaattgtctagtgttttatggacaatgacaattcaaattgcctttggatttagaggatttgtgggtgtgtttatgacggttgcactttttgccatgtggttcgcactaacatgtgcagttcttgttttgatggaaggtacatctgccatgcttcattccttacgtttgcactgggttgaatctatgtccaagtttttcgtgggtgaaggtttaccatacgaaccattcgcatttgagtataaagacatggaagtcgctgttgctagtgcaagctcttccgcttcaagctaaattttgaggacttttaaaaaaagcgaaacatttaagtacttcattaaataataaatgatgctactatatagtgagtaaaccttattatatactatcaatgctaatt

SEQ ID NO: 2732 - DNA, 1176 bp, Saccharomyces cerevisiae
agctaagcaatctatagtgtaacgttggctttctgtacaactgctactgattgagggcatttttcgaatttaaaaaagaaagaaagaaaggaaaatcaaattacaatgtctctacaacacgagaaagttaccattgcaccactagttttgctatctgctttggatcattatgagcgtacgcagacaaaagaaaacaaaagatgcgttggtgtcatcttaggtgatgctaacagttccactatcagagtcactaattcctttgccttaccgtttgaagaagatgagaaaaactctgacgtgtggtttttagaccataattatattgaaaacatgaatgaaatgtgtaaaaagattaatgccaaggaaaaactcattggatggtatcatagtggtcctaaattaagggcttctgacctcaagattaatgagctgtttaaaaaatatactcagaataatccgctattattaattgttgatgtcaaacaacaaggtgttggtttaccaacagatgcatatgtcgcgattgagcaagttaaggatgatggtacgtctacagaaaagacgtttcttcatttgccttgtactattgaggccgaagaagctgaagaaattggtgtagaacacttattgagagacgtacgtgatcaagcagcaggtggcttatctatccggttgaccaaccaattaaaatctttgaaaggattacaaagcaaactaaaagacgttgtcgagtacttagacaaagtcattaataaggaattaccgataaaccacactatattgggcaagctacaagatgttttcaaccttttaccaaatctgggaacacctgatgatgacgaaatagatgtggagaatcatgacagaattaatatttcaaataacttacaaaaggctttaactgtgaaaactaatgatgaattaatggttatatatataagcaatttggttaggtcaattatcgcgtttgatgatttgattgaaaacaaaattcaaaataaaaaaattcaagaacaaagagtaaaggacaaacaatcaaaagtctctgatgacagtgagagtgagagtggtgacaaagaagcaactgcgccattgatccaacgaaagaacaagaaaaattaattcaaaaattaacataacataatatatgaaatagatgtgtaaaacgctatgtat

SEQ ID NO: 2733 - DNA, 1381 bp, Saccharomyces cerevisiae
caaagatattaataactaagaatgagtgaagaacaggaccctttattagcaggattgggggaaacgtccggcgacaatcacacccaacagtcacacgaacaacaaccagaacaaccacaggaaacggaagaacatcatgaagaggagccttctagagtggatcctgaacaggaggcccataacaaggccttgaatcaattcaagagaaagctgctagaacacagaaggtatgatgatcaattgaagcagcgccgtcaaaatatacgagatctagagaagttatatgacaagactgaaaacgacataaaagctttgcaaagtattggacaattgattggcgaagtcatgaaggaattatctgaagagaaatatatagtgaaggcctcttcgggcccacgttatattgtcggagttaggaattcggtagatcgctctaaattaaagaaaggggtgagagtcaccttagatatcaccactttgactataatgagaattttgcccagagagacagatccactggtgtataatatgaccagttttgaacaaggtgaaatcacttttgatggtattggtggtttgactgagcaaatcagagaattaagggaggttatagaattaccattgaagaacccagaaattttccagagggtcggtatcaaacctccaaagggtgtgctactatatggtccccctggtactggtaaaactttactagcgaaggcagttgctgctacgattggagccaacttcattttctctccagcgtctggtattgtggataaatacattggtgagtctgctcgtattattagagaaatgtttgcatatgcaaaggaacacgaaccttgcatcatttttatggatgaagtggatgctattggtggtagaagattcagtgaaggtacttcagcagaccgtgaaattcaacgtacgttgatggagttgttgacccagatggatggttttgataatcttggacagactaaaatcatcatggctacgaatagaccagatactttagatcctgctttgttgaggcccggtagactagacaggaaagttgaaatcccattgccaaatgaggccggcagattagaaattttcaaaattcatactgcaaaagtcaaaaaaacaggggaatttgacttcgaggctgctgtaaaaatgagtgatggtttcaatggtgctgatattcgtaactgtgcaactgaagcaggttttttcgccataagagatgaccgtgatcacatcaaccctgatgatttaatgaaagccgtaagaaaagtagctgaagttaagaaattggaaggcactatagaataccaaaaattatgatgttaaaaagacatgtgtatgtataggtatgtgtatatcagtaaca

SEQ ID NO: 2734 - DNA, 2191 bp, Saccharomyces cerevisiae
aaaatttgtcttgaacacgtcgaagatcactgaacgaataaaagatgcgactggaacaatagtcagttataattgaccaaagaaggccttcgcaacaaaataaatatactgcatattacagcacaatgcctacaaattacgagtatgatgaggctagtgagacgtggccgtccttcattttaacggggctcttgatggtcgtcgggcctatgacactgcttcaaatataccaaattttttttggggccaatgctgaagatgggaattcagggaagagtaaggagtttaatgaggaagttttcaagaacttgaatgaagaatacaccagtgatgaaatcaaacaatttagaaggaagtttgataaaaatagtaataagaagtccaaaatatggagcaggagaaatattataattattgtgggttggatcttagttgcaattcttctgcaaaggattaatagtaatgacgcgattaaagacgctgctacaaaattatttgatccttatgaaatccttggtatctctactagtgcttccgatagagacatcaaatctgcttatagaaaattatctgttaaatttcatccagataaattagcaaagggcctaacacctgatgagaaaagtgtgatggaagaaacttatgttcagattacgaaggcttacgaatcccttactgacgaattggttaggcaaaactatttgaaatacggtcatccagatggcccacaatctacttcacatggtatcgctctaccaagatttttggtagatggaagtgcatctccattattagtggtttgttatgttgcgctactaggtttaatcttgccatattttgttagtagatggtgggcaagaacacaatcgtatactaagaagggaatacataatgtgacggcttctaattttgttagtaacttagtcaattacaagccatctgagattgtcaccacagatttgatcttacactggttatcatttgctcatgaatttaaacaattcttcccggatttgcaaccaacggattttgaaaaacttttgcaagatcatattaaccgcagagatagtggtaaacttaacaatgcgaaatttagaatagtggccaaatgtcactctttgttacacggtttattggatattgcttgtggattcagaaatttagatattgcattgggtgcaatcaatactttcaagtgtattgttcaggctgtaccattaacaccaaactgtcaaatccttcaattgccgaacgtagataaagagcactttattaccaaaaccggagatattcatacattaggtaaattgtttactttagaagatgccaagattggtgaggttcttggaataaaggatcaagcaaagttaaacgaaactttgagagttgcatcgcatattccaaatctaaagatcatcaaggcagacttccttgtcccaggtgagaaccaagtaacaccatcatctaccccatacatttctttgaaagtactggttcgttctgctaaacagccattgataccaactagcttaattcctgaagaaaatttaacagaacctcaagattttgaatctcaaagagatccatttgctatgatgagtaaacagccactcgtcccatattcctttgcaccatttttccctacaaagagacgtgggagttggtgctgtctggtaagttctcaaaaagatggtaaaatacttcaaacgccaattatcattgaaaagctatcttacaagaacttgaacgatgacaaagatttctttgataagaggataaaaatggatttaaccaaacacgaaaaattcgatataaatgattgggaaatcgggaccataaaaattccattaggtcagcctgcacctgaaactgttggtgatttcttttttagagtaatcgttaaatccacagattatttcactacagatttggatattaccatgaatatgaaagttcgtgattctcctgcagtggaacaagtagaggtgtattctgaggaggatgatgagtactctactgatgacgacgaaaccgaaagtgatgatgaaagtgatgctagcgattatactgatatcgatacggatacagaagctgaagatgatgaatcaccagaatagatataagtgattagtatagtttttcattttagctcttagacgtatatatttcatctttataaaaatagatacat

SEQ ID NO: 2735 - DNA, 1035 bp, Saccharomyces cerevisiae
aaacaatgaggacaaaagcataaagttgtgaagaaaattgcccatacattcaatgccattatttgatcttatttctccaaaagcgtttgttaagttagtggccagtgagaaggttcatagaatcgttccagttgatgcaacatggtacctacccagttggaagcttgataataaagtggatttcttgaccaaaccacgtataccaaactccattttctttgatattgatgcaatcagtgacaaaaaatcgccctatccacatatgttccctacaaagaaggtttttgacgacgctatgagtaatttaggagttcaaaaagatgatatattagtggtttacgatcgtgttggtaactttagctcccctagatgtgcttggacattaggagtgatgggacatcctaaggtgtacttactaaataatttcaaccagtacagagagtttaagtaccctctagattcctctaaggtggcagcgttttcaccctatccaaagagtcattatgagtcctcagaaagtttccaagacaaggagattgtagactatgaggaaatgttccaattggtaaagagtggggaactggctaagaaattcaatgctttcgatgcaaggtcgctcggtagattcgaaggtacagaaccagagcctcgttccgacattccatcggggcatattccaggtacccaaccattaccatatggaagtttacttgatccggagaccaaaacgtacccagaagctggggaggcgatacacgctactttggaaaaggcattgaaagactttcattgcactttggacccaagtaaaccaactatttgctcttgtggaactggcgtttcaggagtcattatcaagacagcattggagctagcaggagttcccaatgttagattatatgatggatcctggaccgagtgggtcttgaaatccgggcccgagtggattgctgaaaacagagattaataagagaaatatattcttgacaagtcgatttatttagctacatatattaattatctatctacttactt

SEQ ID NO: 2736 - DNA, 1119 bp, Saccharomyces cerevisiae
acaatggttgtaggcctgattggtattagaggcatccgcagtacgagacatacgccaaaggcagaatgttagacccacgaatattgccatactacgacccggctgtggagaggaagattgctgtagtaacaggcggaaatacgggtattgggtggtatactgtcttgcatttgtatttgcatgggtttgtcgtttatatttgtgggagaaactctcacaagatttcgaaagcaatccaggagatactggcagaagcaaagaagaggtgccatgaagatgacgacggttcaagcccaggcgcgggcccaggtccaagcattcagcgtctagggtcactgcactatatccatttggatttgacagacttaaaatgtgtggagagagcggcacttaaaattctcaagctggaagaccacatagacgtgcttgttaacaatgcagggattatggcggtgcccttagaaatgacgaaggacggatttgaagtgcaattgcagactaactacatttcgcacttcatcttcacgatgagattattgcctttactgcgccattgtcgtggcaggatcatttccctgtcctcgataggccatcatctagagttcatgtactggaaactgagcaagacgtgggattacaaacctaatatgcttttcacatggtttaggtacgcgatgagtaaaaccgcgctaatccaatgcacgaagatgttggccatcaaataccctgacgttctttgtctctccgttcatccgggtctggtgatgaacacaaacttattcagttattggacaaggttacccatcgtcggtattttcttttggctgttgttccaggtcgtagggttctttttcggcgtatcgaacgaacaaggttcactagcttctttgaagtgtgcattggacccgaatttatctgtcgaaaaagataacgggaagtacttcaccacggggggtaaagaatctaaatcgagctacgtttctaacaatgtcgacgaagcggcatcgacttggatctggaccgttcatcaactaagagaccgtggtttcgatatataacaagacggaaagattgaaagagtagatagatgtacattttatttaaatattagttagtcgt

SEQ ID NO: 2737 - DNA, 2193 bp, Saccharomyces cerevisiae
ggaaaaaagcaatatctgttgcatgccatgtctgactcctcagaagccactgtaaagagaccccttgatgctcacgtaggaccttccgaaaatgctgcaaagaagttgaaaattgagcaacgtactcaggcagatggtattcacgaagcagatgtcggtattactttgttcttatctccagaattgccaggatttagaggccaaattaagcagcgttatactgactttttggtcaacgaaatagatcaagaaggtaaggtcattcacttaactgataaaggatttaaaatgccaaagaaaccacaacgctctaaagaagaggtcaatgcagaaaaggagtctgaagcagctagaagacaagaattcaacgtcgaccccgaattaagaaatcaattggtggagatatttggtgaggaagatgtattgaaaatagaatccgtttatcgcacggctaataaaatggaaacggcaaaaaatttcgaagataaatctgttagaactaaaattcaccaactgttacgtgaggcatttaaaaatgaattagaatctgtgactactgatactaacacttttaagattgcaagatcaaatagaaattcaagaaccaataaacaagagaaaattaaccaaaccagggacgctaacggtgtagaaaattggggatatggtcccagtaaagattttattcacttcactctacataaagaaaataaggatactatggaagctgtcaatgttataacaaagttgttaagagttccaagccgtgtaattagatatgcaggtactaaggatcgtagagcagtaacgtgccaaagggtttcgatttcaaagattggtttggatagactaaatgctttaaataggactttaaaaggaatgattatcggaaattacaatttttcggatgcaagtttgaatctgggagacttgaagggaaatgagttcgttgttgttattagagatgttaccaccggcaatagtgaggtatcactggaagaaattgtgtctaacggctgtaagtctttatcagaaaatgggtttatcaattattttggtatgcagagattcggtacattcagtatttctacgcacacaattggtagagaattgctcctttcaaactggaagaaggctgctgagttgattttatctgaccaggataacgtgcttcctaaatctaaggaagctaggaagatttgggcagaaactaaggacgcggctttagcattgaagcagatgccaagacagtgtctcgcagaaaatgcgttactatattctttatctaatcaaagaaaagaagaagatggaacttattctgagaacgcttattatactgctattatgaaaattcccagaaatttgagaactatgtatgtacatgcctaccaaagttacgtctggaattctattgctagtaagcggatagaactacatggtttgaagttagttgtaggtgaccttgtcattgatactagtgaaaagtcaccactaatttctgggattgacgatgaagactttgatgaagatgtccgtgaagctcagttcattcgtgcaaaagcagtaactcaagaggatatcgactcagttaagtataccatggaagatgtcgtgttaccatcgccgggttttgatgtgctttatccttccaacgaagaattgaagcaactgtatgtggatatattgaaagcagataatatggacccatttaatatgagaagaaaagttcgcgatttttcattggctggctcttatagaactgttattcaaaagccaaagagtttagagtatagaataattcactatgatgatccttctcaacaattggtgaacactgatttggacatcctgaataacaccagagcaaaagaaagcggccagaagtatatgaaagccaagttggacagatatatgccagataaaggcggtgagaagactgcggtggtgttaaaatttcaattaggaacctccgcatatgccaccatggcattacgtgaactcatgaagcttgagacttctcgccgtggcgacatgtgtgatgttaaggagaatatctaaggttatacgaggtgcaatattcatgtatattagtttactttttttgtcggaagctctttccctcatacactattgttgtgtccgtgtcgtgtcacttcaggcgtcggtaaatatgtatctgcgcatcgcacacaa

SEQ ID NO: 2738 - DNA, 416 bp, Saccharomyces cerevisiae
ccagataaatcatagataaaatggctgaatcccatagactatacgttaaaggtaagcacttatcctaccaaagatctaagagagttaacaacccaaatgtctctttgattaagattgaaggtgttgccactccacaagaagctcaattctatttgggtaagcgtatcgcctacgtttacagagcttccaaggaagtcagaggttccaagattagagttatgtggggcaaagtcaccagaactcacggtaactctggtgtcgttagagctacctttagaaacaacttgccagccaagactttcggtgcctctgtcagaattttcttgtacccatctaacatttaattaagttaaaccaaaacaaaattataattattgttattaatattgtataaaatataaaaaataagcattcat

SEQ ID NO: 2739 - DNA, 651 bp, Saccharomyces cerevisiae
gaggtttcattacagctcatacatcaccaacaaacatagcacagcatagatgttcgccagactcgctaatcctgcccacttcaagcctctcacgggctcccacataacaagagctgccaaaagactttaccatcctaaggtaattgaccactacacaaacccaagaaacgttgggtccatggataagtccttagctaatgtcggcacaggaatcgtgggcgcccctgcgtgtggtgatgtgataaaactacaaatacaggtgaatgataaatcgggtattatcgagaacgttaagttcaagaccttcgggtgtgggtctgccatcgcttcctcctcctacatgaccgagctggtacgcggtatgtcacttgatgaggccgttaaaattaaaaacacggaaatcgcgaaggagctaagtcttcctccagtaaaactgcattgttccatgcttgcagaagacgctatcaaggcggcaatcaaggactacaaaacaaagaggaacccctccgttttgcattgaaagagaggcgatacgataatatgataaaatacaagaggtcctctctttccggttttttttttctggttgttttatagaaagggttaaaagaataattaggtataataataagtaattaatatcagaaacag

SEQ ID NO: 2740 - DNA, 533 bp, Saccharomyces cerevisiae
ttgcttccataacaaccgcagcaatgtctaacactctatttgatgatatattccaagtctcggaagttgatcccggtcgttataacaaagtctgccgtatcgaagccgcatctaccactcaggaccaatgcaaactaaccttggatataaatgttgaattgtttcccgtcgccgcacaagattctttgacagtgactattgcatcctctttaaacctcgaagacaccccagctaacgactcttctgcgacaagaagctggagacctccacaggctggtgacagatcccttgcagatgattatgattacgtcatgtatggtaccgcttacaagtttgaggaagtaagcaaggatctaattgccgtttactactcattcggtggcctcttaatgagattagaaggtaactatagaaatttgaataacttgaagcaagagaacgcttatcttttgattcgtcgttagcagcattggaccgagtgctaaaaaaaagggcgatcacttactgctactagtaatataaataatacttta

SEQ ID NO: 2741 - DNA, 1296 bp, Saccharomyces cerevisiae
ctgagggtagtaacaaagcgttttgcacttttctgatcgtggtacacatatataagcgtttgtatgaagctactaaccttcccaggtcaagggacctccatctccatttcgatattaaaagcgataataagaaacaaatcaagagaattccaaacaatactgagtcagaacggcaaggaatcaaatgatctattgcagtacatcttccagaacccttccagccccggaagcattgcagtctgctccaaccttttctatcaattgtaccagatactctcgaatccttctgatcctcaagatcaagcaccaaaaaatatgactaagatcgattcccccgacaagaaagacaatgaacaatgttaccttttgggtcactcgctaggcgagttaacatgtctgagtgttaattcactgttttcgttaaaggatctttttgatattgctaattttagaaataagttaatggtaacatctactgaaaagtacttagtagcccacaatatcaacagatccaacaaatttgaaatgtgggcactctcttctccgagggccacagatttaccgcaagaagtgcaaaaactactaaattcccctaatttattatcatcttcacaaaataccatttctgtagcaaatgcaaattcagtaaagcaatgtgtagtcaccggtctggttgatgatttagagtccttaagaacagaattgaacttaaggttcccgcgtttaagaattacagaattaactaacccatacaacatccccttccataatagcactgtgttgaggcccgttcaggaaccactctatgactacatttgggatatattaaagaaaaacggaactcacacgttgatggagttgaaccatccaataatagctaacttagatggtaatatatcttactatattcatcatgccctagatagattcgttaagtgttcaagcaggactgtgcaattcaccatgtgttatgataccataaactctggaaccccagtggaaattgataagagtatttgctttggcccgggcaatgtgatttataaccttattcggagaaattgtccccaagtggacactatagaatacacctctttagcaactatagacgcttatcacaaggcggcagaggagaacaaagattgagaaagagatcaaaactgcgaactctctccactcccagtctgtgcttctacgcattcattgaaaatggaaagaggacgaaagtgtgcaaaaaattagccaacttccctttatataaatatcgtatacacatacatacattccttctatact

SEQ ID NO: 2742 - DNA, 3206 bp, Saccharomyces cerevisiae
ctattttgttttgttgttttcttccagcctcatgacctcaataaacttagttagggtgttattcgtgtaaaaaatatagaaagcccctaatgtctgcttcaactcattcgcataaaaggaagaatagtcatttatttccgcaaaggaaaagttcaaactcttccatggataagccattctttcctaataacgatagtgtagctaacacagatcctcaaagtaacgagaatggacatacaattaacgagattagaccgacagaagctacaatagatgttacagatgttcctcaaaccccctttctccaggaacaatactcaatgcgtcccagacgagaaagcttccagtttaatgatattgaaaaccagcatcacacgcattcctttttcagtgtaaacaaatttaatcgtcgatggggagaatggtctctgcccgagaaaagatcttatgtcttagtctttacattaatagcactatcagttttagttctacttgttattctaataccttcaaaacttctacctaccaaaatcacgcgtcctaagacatctgcaggagattctagtttgggcaaaagatctttctcaattgaaaacgttttgaacggagattttgccatccctgaggatactttccactttattgacccaccacagcgcttattaggccaagactcagatccggggctatattttactacaaaagaaattgatggacatacgaattttattgcaaagcagttatttgatgagacttttgaagtaaaccttgggggcaataggttcctatatgaaggagtagaatttaccgtaagtactgtccaaattaattataaattggataaacttatatttggaactaacttagagtctgagtttagacactcctcgaaggggttttattggatcaaagacttaaacacaggtaatattgaaccgatattacctcccgaaaaatcagatgataattatgaacttggattatcaaaactttcctatgcgcatttttctcctgcatacaattatatctattttgtttacgagaacaatctgtttctgcaacaagtaaatagcggagttgccaagaaggtaacggaagatggctccaaggatatattcaatgccaaaccagactggatatatgaagaagaggtccttgcttctgatcaagcaatatggtgggctccagacgattcgaaggctgtatttgcaagattcaatgacaccagtgttgacgatatccgattaaaccgttacacaaatatgaacgaagcatacctttccgacaccaaaatcaaatacccgaagccagggttccaaaatccacagttcgacttgtttctcgttaacttacagaacggtataatttactcaattaatactggtggtcagaaggattccattctgtataacggaaaatggattagtccagatacattcaggttcgaaatcaccgatagaaactctaagatattagacgtaaaagtgtatgatataccatcatctcaaatgcttactgtgaggaacaccaattcaaacctgttcaacggatggatcgaaaagacgaaggatattttaagcatccccccaaagccagagttgaaaagaatggattatgggtacattgatattcatgcagacagtagagggttcagtcatctcttttattacccaaccgtttttgccaaagagcctatccagttgaccaaagggaactgggaagtgactggaaatggaatagtcggctacgaatatgaaacagatactatattttttactgccaatgagattggtgtcatgtcacaacacctttatagtatcagccttacggattctacaactcagaatactttccaaagtttacaaaacccatcagacaaatacgatttttatgacttcgaattaagttctagtgcgagatatgctatttctaaaaaactggggcctgatacacctattaaagtagctggtccgcttacaagggttttgaacgttgccgaaattcacgatgattcaatcttgcaactgacgaaggatgaaaagttcaaggaaaaaataaagaactacgatttacctattacaagctataaaaccatggtcctagacgatggcgtagaaataaattacattgagatcaaaccagccaatttaaatcctaaaaaaaaatacccgatattagtcaacatttatggtggtccaggatctcaaacatttaccaccaagtcgtctcttgcgtttgaacaagcagttgtttcaggattagatgttatcgtcctacaaatagagcccagaggaactgggggtaaaggttggagttttagatcatgggcccgcgaaaaattaggatattgggaacctagagacattactgaagtcacaaaaaaattcatacaaaggaatagccaacatatagatgaaagcaaaattgctatttggggttggtcatacggcggttttactagcttgaaaaccgtggaattagacaacggcgacacatttaaatacgccatggctgtcgcgccagtaacaaactggacattgtatgattccgtttacacggaaagatatatgaaccaaccatcggaaaaccatgaaggctattttgaagtatccaccatccaaaatttcaaatcattcgaatctttaaagcgtcttttcattgtgcacggaactttcgatgataatgttcacatacaaaatacttttagattagttgatcaactgaatctattgggattgacgaactatgacatgcacatttttccagactctgatcattccatccggtaccacaacgctcaaagaattgtattccaaaaactatactattggttaagggatgcctttgctgaacgctttgacaacactgaagttttgcatttataaaactttatggatgattgcgatattaacgataacgatagagacaaacacgcgattaataatataataatatgaagtttctcaattgcaacgcataattttggaatgacatattaggtacaaatgttagacctaataaatgtaatatttaacgacggttgtacgtacaggtacattattttgtgtactatactaataagagtattttatatagggcggtgatgatacccatcgagctattatcaccacacagttttcgtatctgtgatagaacggctcacaaaatcaatgagaagaaaagtgtaattataatcttagtgtatg

SEQ ID NO: 2743 - DNA, 727 bp, Saccharomyces cerevisiae
aaaagactttgggataaagttggggaatacagcaaataacactattccaagatgttcagacaatcaattaggccacttgtttcaaatagactaaccttcattcgttataacagttctccagcctacacggctgcagtcagcctattgaaaggagatttgaaaaaggctatgattgccaaggatgagatgaagaagacagcaatcagaaatatgttatctgccataaaaaacaaagaaattgctttaaaagggaagagcgctgatgagtactccctgtacgacatgtactccaagttaatatctcaaagaaaggactcgatcaatgagttccttgctaacaagagggacgatctggtggccaaagagcaaggtgaaatggacattataaagaaatatatggaccaattgccagtgtcttcagagcttgatattgatcaaaatgtgaagaaattactggacgccctcaaaacaaaggcaggtgaaaaaaaagttcaaattaaggaaatcatgggagaaatcgactggaagtcattgccaacagaatggaagacatctccaactgccatcaaaaatagcattgttaagcaattcaaggaaattttcaaatgaggtccttgttttctgcgcgatgaatcacagcccaaccttcaatagtaaaaaagaagtaaaaatattcgtcaaaaattatgaaagatactttgttaatacatatcacagttacatatta

SEQ ID NO: 2744 - DNA, 1167 bp, Saccharomyces cerevisiae
gaagaggaagtgcagcaactcaagtttttctacagactaaattgtttttactcttgactccaaaagcccttttttttttttttggtgccatataatagacgctcttttatggatcattcaatagaagtcactttcagagtaaaaacacaacaggttataataccggaacaaaacatccggggaaatgaacttcccttacgtcggtggcagatggaactcctcatgttagatgcaacaggaaaggaagtggagcctaccatcctctctaaatgcatctaccatttgcactctagcttcaaacagcccaaaagacgactgaactcgctgccattttttatcaaggaaaccggttggggagagtttaacttaaaaatagaatgcttttttataggtaacgctggaaagtttagcattgaacatgacttaacgtttgaagatgatgcatatgcagttgactataccgttgatgtgcctcatgaattctcacatctcaatagtgaactatctaaatattttgatctcccgtggaaagtagtgtctccggaggaagaaatgtctcttcgtatagccgatttgccctggattaaaagccttgcgcttatagatgaggatatgatgacggacgtggttcagatgatattgaatgatcctgcagtacagagagcaattgaaaatcatcccagaagggagcagttttttatgtttataacacaactaccagatgatttgttaatgaaaattcaggcatttttgaaattaccgaacaaaaattccactaaacaagaaaggacaaattttgggtcagacgcaatacataaggacgagccagtgaaggctcataacaagctaaagtagggacagccatcatgaaattaaacaatgcctgaaaacatagatgattctagcaagttggtcaaataagtcagtgaataatactgtttccaaaacgattgaaaagaatttttgagtgcatgacacttttgttcgtttttgtttcgtttatccaaagagaaaaaggaagcaaatgacaatgctttgaattttcattgttgaatgttttgacttactttattaaaggacgtttttgcgcttccacagaactaatgttactgttgttattctatgtaaatatgggatgggtgtaggtatgtatatttatataatagc

SEQ ID NO: 2745 - DNA, 1523 bp, Saccharomyces cerevisiae
cgagcctttcaacagttatcgaaacgtaaattggatcccatcagtttttttgtttcaattcgtcactgtaaggaaacaaacggtagataatattttagaagaaaggtggatttagccttttgtacctattttcgccaagcaagataaccatgtcagaaccagtgataaagtctcttttggacacagacatgtacaagattacgatgcatgctgctgtcttcactaattttccagatgttacagttacttataaatataccaacaggtcgtcccaattgaccttcaataaggaagccattaattggttgaaagagcaattttcgtatttgggaaatttgaggttcacagaagaggaaattgaatacttaaaacaggaaatcccatatttgccatcggcatatattaagtatattagcagttctaattacaaactacaccctgaagagcagatttccttcacttcagaagaaatcgagggcaagcccacccactacaaattgaaaattttagtcagtggtagttggaaggatactatcctttatgagatccccttactgtccctaatatcagaagcgtattttaaatttgttgacatcgactgggactacgaaaaccaattagaacaagctgagaagaaggcggaaactttgtttgataatggtattagattcagtgaatttggtacaagacgtcgtagatctctgaaggctcaagatctaattatgcaaggaatcatgaaagctgtgaacggtaacccagacagaaacaaatcgctattattaggcacatcaaatattttatttgccaagaaatatggagtcaagccaatcggtactgtggctcacgagtgggttatgggagtcgcttctattagtgaagattatttgcatgccaataaaaatgcaatggattgttggatcaatacttttggtgcaaaaaatgctggtttagcattaacggatacttttggaactgatgactttttaaaatcattccgtccaccatattctgatgcttacgtcggtgttagacaagattctggagacccagttgagtataccaaaaagatttcccaccattaccatgacgtgttgaaattgcctaaattctcgaagattatctgttattccgattctttgaacgtcgaaaaggcaataacttactcccatgcagctaaagagaatggaatgctagccacattcggtattggcacaaactttactaatgattttcgtaagaagtcagaaccccaggttaaaagtgagccgttaaacatcgttatcaaactattagaagtaaatggtaatcacgctatcaaaatttctgataacttaggtaaaaatatgggagatcctgccactgtgaagagagtgaaagaggaattgggatatactgaacgaagttggagtggtgataacgaagcgcacagatggacctaattattcagttatgggtactgacatctctgcgattttataaatatgacatatagatatgcagctgatatcgcaaaaataaaacat

SEQ ID NO: 2746 - DNA, 3638 bp, Saccharomyces cerevisiae
ctagggacttagtgcttgttgaaaaatggttgctgcgacaaaaagacggaaaactcatatacataagcatgtgaaagacgaggcttttgatgatttattgaaaccagtatataaaggtaagaaactaactgatgaaatcaatactgctcaggataagtggcaccttttaccagcattcttgaaggttaaaggtttggtgaagcaacatcttgactcatttaactacttcgttgatacagatttaaaaaaaattataaaggcaaatcaattaattttgagtgatgttgatccagaattctacctgaagtacgtcgatattagagtgggtaagaagtcctcttcttcgacaaaagattatttgactccgcctcatgagtgtaggcttagagatatgacatactctgcaccaatctacgtggatatagaatacactagaggtagaaacattattatgcataaagacgtggaaattggtaggatgccgatcatgctgagatctaataaatgtatcctatatgatgctgatgaatcgaaaatggctaaattaaacgagtgtccgttggatcctggtggttactttattgttaacggtaccgaaaaagtaattcttgttcaagaacaattatccaagaatcgtattattgtggaggcagatgagaagaaaggcattgttcaggcctccgttacttcatctacccatgaaagaaaatctaagacttatgtcattaccaaaaatggcaagatctatttgaagcacaattccatcgctgaagaaattcctattgctattgttctcaaagcctgtggtattttatcagatttagaaattatgcaattggtttgcggtaatgatagtagctaccaagatatttttgcagtcaatttggaagaatcttcgaaattagatatttacacacaacagcaagctttagagtatattggtgcaaaagtaaagacaatgagaaggcaaaaactgactatcctgcaagagggtatagaggccattgctaccacggttattgcacatttgactgtggaagcccttgactttagagaaaaggctttatatattgccatgatgacgcgcagggtggtgatggcaatgtataaccctaagatgattgatgatagagattatgttggtaataaacgtcttgaattagcaggccaattgatttctttattgttcgaagatttgttcaaaaagtttaataatgattttaaactaagcattgataaggtcttgaaaaaaccaaatagggctatggaatacgatgcattattgtcaattaacgtccattcaaataacatcaccagcggactgaacagagctatctcaaccggtaattggtctcttaaaagatttaagatggaaagagcgggtgttacacatgttctttccagactatcttatatttccgcattgggtatgatgacaagaatttcttctcagtttgaaaaatcaagaaaagtttccggtccaagagcattacaaccttctcaatttggtatgctttgtactgcagatactccagaaggtgaggcgtgtggtctagtgaaaaatttagcattaatgactcatattactacagatgacgaagaggaacctataaagaaattatgttatgttcttggtgtagaagacataacattgattgacagtgcatccttgcatttaaactatggtgtttatttgaatggtactttaattggttcaatcagattcccaacaaaattcgttactcagttcagacatctgagaagaacaggtaaagtgtcggagtttatctcaatttattcaaattctcaccaaatggcagttcatattgcaacagatggtggtagaatttgtaggccattaatcattgtttctgatggtcaatctcgcgtgaaagatattcatttacgcaaattattagatggtgagttagatttcgatgattttttgaaactcggattggtggaatatttagatgtcaatgaagaaaacgattcttacattgcattgtatgaaaaagatatagttccctcgatgacacatttagaaatcgagccattcacaattttaggtgctgttgctggtttaattccatatccacatcataaccaatcccctcgtaacacatatcaatgtgcgatgggtaagcaagcgattggtgcaatcgcctacaatcaattcaagagaatagatacattattatacttgatgacttatccacaacagccaatggtgaaaaccaaaacaattgaattgatcgattatgataaattacctgctggtcaaaatgctacggttgctgtcatgtcctattctggttatgatattgaagatgctttggttttgaataagtcatccatcgatagaggtttcggccgttgcgaaacacgtagaaagacaaccactgttttgaaaagatatgcgaaccatacccaagatatcatcggtggtatgagagttgatgaaaatggagatcctatctggcaacatcaatctcttggtcctgatggtctaggtgaggtgggtatgaaggtccaaagtggacaaatttatataaataagtcagttccaactaactcagcagacgccccaaacccaaacaacgtaaacgtccaaactcaatatagggaagctccggtaatatatagaggtccagaaccttctcacattgaccaagttatgatgtctgtttcggataacgatcaagctttaatcaaagttttgctaagacaaaacagaaggccagaattaggtgacaaattttcttctagacatggtcaaaaaggtgtttgtggtattattgtaaagcaagaagacatgcccttcaacgatcaaggtatagttccagacattatcatgaaccctcacggttttccatctcgtatgactgtgggtaaaatgatcgaactgatatcgggtaaagctggtgtattgaatggtacattggaatatggtacttgttttggtggttctaaacttgaagatatgtctaagattttggtagaccaaggtttcaactattccggtaaggatatgttatattcaggtataacaggtgagtgtttacaggcttacatcttttttggccccatttactatcaaaagttaaagcatatggtcttagataagatgcatgcaagagctcgtggtccaagggctgttttgacacgtcaaccaactgagggtagatctagagatggtggtctgaggttgggtgagatggagagggattgtgtaatcgcgtatggtgcttcacaattgctgttagaaaggttgatgattagttcagatgcttttgaagttgatgtctgcgataaatgtggattaatgggctatagtggttggtgtactacctgcaaaagtgctgagaatattattaagatgactattccatatgcagcaaaactgttattccaggaattattatccatgaacatagccccaagattaagattggaagatatcttccagcagtaagaaatcatatatcttgtactaaattttgcgttatgttagcaatcatatctatttcgtgaggaactttaagagagttgaacgatttcgaaaattatataacagtaaaccgtacttctttcatttttgtaccttgctttacatcattactttttataagatccat

SEQ ID NO: 2747 - DNA, 1324 bp, Saccharomyces cerevisiae
aatagaaaaagaaaattgcgggaaaggactgtgttatgacttccctgactaatgccgtgttcaaacgatacctggcagtgactcctagcgctcaccaagctcttaaaacgagaattaagaaaaagtcgtcatctttcgataagtttttcccacagcaaagcaatagtagaaaaaaacaatgggaaacgttgaatgaagacaaagcgtcgtggtttaaaaggaaatacgctcacgtacatgctagggaacaggaccgtgcagcggatccatatggcaagaaaaaggcccacgtcgagaagctaaaggagatcaagaatcaggcgaaattaaaccaaaagagccataaatccaagttccagaataaggacattgctctgaaacttatgaatgataatcctatcttcgaatatgtctacggcaccaacagcgtttatgcagcgttgctgaacccgagtagaaattgccattctcggttgctgtaccatggcactattcctagtaaatttcttcagatagtcgatgaactgaaggttacgacagagctggtggacaagcacagattaaacttgttgaccaattacggggtgcacaataacattgctcttgagacaaaacctttgcagcctgtggagattgcgtacctaggcgacatggacaccagttcagcagcattaagcattcacgagctgggcttcaataacgaaaatatacctcatgaactgccttatggtacgaaaacagacgctaagaagtttcctctcgggttatatctggatgaaataactgaccctcacaatatcggtgccattattagaagcgcttacttcctgggggttgacttcattgtgatgtcgagaagaaactgctctcctttgacgcctgtggtgtccaagacaagcagtggggccctcgaacttctgcccatattttacgttgataaaccgttagagttttttactaaatcacaagaaatgggtggctggacgtttattacaagccacttagctaatgccacgtcagaaaaatacactgttggaaaaactattagcatgcacgatttgaacggattatgtaacgagctgcctgttgttctagtggtggggaacgaaagccagggcgtaagaacgaatttgaagatgaggagtgacttcttcgtcgaaattccctttggtggcattgagaaaggcaatcgggccccagaacccattgttgactcactaaacgtaagcgtggctactgcattgttaatagataatattctaacttgtaaataaccgtcatataaagtagcacaaacatacataataagcctatatacattata

SEQ ID NO: 2748 - DNA, 1613 bp, Saccharomyces cerevisiae
atgtcctcccaacaacacaagttcaagcgcccagatgtctccgttagagacaagaaattggacactcttaacgttcaattgaaaaaaatcgacactgaaatcggtttaattagaaagcaaatcgatcaacaccaggtcaacgataccacccaacaagaacgtaagaagttacaggataagaacaaggagatcatcaagatccaagctgacttgaaaacccgtagaagcaacattcacgactctattaagcaattggatgctcaaatcaagagaaaaaacaaccaaattgaggagaagttaggcaaaaaggccaagttctcgtccactgcagaagccaagcaaagaatcaatgagattgaagagtctattgcctctggtgacctttctttggttcaagaaaaactactagtcaaagaaatgcaatctttgaacaaattgattaaggacttagttaacatcgagccaatcagaaagtctgttgatgctgacaaggctaaaatcaatcaattgaaggaagaattgaacggattgaatccaaaggatgtctccaaccaattcgaagagaaccagcaaaaattgaacgatatccattcaaaaactcaaggtgtttacgacaaaagacaaactttattcaacaaacgtgctgccttgtacaagaagcgtgacgaattatacagtcaaatcagacagatcagagctgactttgacaacgaattcaaatcattcagagccaaattggacaaagaacgtttgaaacgtgaagaagaacaaagattatccaaacttttggaacagaaagatgttgatatgggtaaattgcaagaaaagttgactcatgccaagattccagccttcacttatgaaatcggtgccattgagaattctttgcttgtcctggacccaacttatgtgaaaccaaagaaaaacatcctgcctgacttgagtagcaatgctttggagaccaagcctgccagaaaagttgttgctgatgatttggttttggtcactccaaagaaggatgattttgtcaatgttgctccatctaaatctaagaaatacaagaagaagaaccaacagaagaacactgaaaatgagcaacctgcttctattttcaacaaagtcgatggcaagtttactttagaaccaacactaattgctactttggccgaattagacgtaactgtcccaatcaacagtgatgatgtcaagatcaccgttgagcaattgaagaagaagcatgaagagcttttgtcgaaacaagaagagcaaacaaaacaaaacattgaatctgtcgaaaaggaaattgagaaattaaatttggactactctaacaaagagcaacaagtaaaaaaggaattggaagaaaaaagattgaaagaacaggaagagtctgaaaaagataaagaaaattaaacctgaagtagaaaaaaatttttctcctgatctttcttcattacttaatttttctttggttgaggtgatgtttttttctgtacttagtattcactacgttaaaaaaacacatggtcttattttccaaaatgcctattccctatatatctttgcctatatgtatatagtattaatagcttagattgtttctgctttctaaa

SEQ ID NO: 2749 - DNA, 1406 bp, Saccharomyces cerevisiae
gagaactgttaagccacaataatgtatagacgatctgttggagtactatttgttgggagaaatacaagatggatttcgtccactattaggtgtggaacgagcgcaactcggccaataagatccaatgcattgaatactgattcagataacgctagcgttagggtaccagttggaaattcaactgaggttgaaaatgcaaccagtcagttaacagggacttcgggaaaaagacgcaaggggaacagaaaaagaattacagagttcaaagatgctcttaatttgggtccatcttttgcagattttgtttcaggtaaagcttcgaaaatgatcttggaccctctggagaaggcaaggcaaaatacagaggaagctaaaaaactacctcgttggcttaaggttcctattcctaagggtaccaattaccataaattgaaaggcgacgtaaaagaattaggcctgagtactgtttgtgaggaggcaagatgtcccaatattggtgaatgttggggaggcaaagataaatctaaggcaacggcaacaattatgctgcttggtgatacttgcactcgtggatgtaggttttgttctgtgaagaccaatagaacgcctagtaagccggacccaatggagcccgaaaatactgccgaagctatcaaaagatgggggttgggttatgttgttttaactaccgttgatagggacgatttagtcgatggtggtgctaatcacctggccgagacggttcgcaaaatcaaacagaaggcaccaaatactcttgtagagactctttctggtgatttcagaggtgatttgaagatggtggacattatggcacaatgtgggcttgatgtttacgcacataatttggaaacagttgaatcactaacaccacatgtcagagacagaagagctacttatagacagtctttgagtgttttagaaagggcaaaagctacggttccgtcactgattactaaaacatcaataatgctgggtctaggagaaactgatgagcaaattactcaaactttgaaggatttgcgcaatattcaatgtgatgttgttacatttggtcaatatatgaggccaaccaagagacatatgaaagtcgtagaatatgtgaaacccgaaaagtttgactactggaaagagagagctttagagatgggattcttgtattgtgcatctggacccctagtaagatcgtcatataaggctggtgaagcatttattgagaacgttttgaagaaaagaaacatgaaataatgcacactgaaatctaatagttggaagaaaacaattatggcatggaccgcaatgtctttgcttgctggattatttatttatatcttgtattttatttatttttatggttagtatgtttttgcatatttatttttaacaca

SEQ ID NO: 2750 - DNA, 1044 bp, Saccharomyces cerevisiae
gaggtcaagatgctctttttttcttcatcgtttcagttttgtatcttgagcggagtgaacttgccctttaagcgggccatacccttacatggcgttagcacttattttcaaggtgaatatatacaatgtcagttacccgtttttttgtcttccgctgtataagcttgctatcattaaaagccgcatgtggcatcctgaattctgccaccccttaaatacaaaaaatagtgtaaatggtacttgatctcttctggaggaataaacaataattcttgatggaatttgagagaaagtaagtgttcggctaagcacaataaagatataaacctgtgactacctatataagttcgtaatgtcagcacctgctcaaaacaatgccgaggttcccactttcaagttagttcttgttggtgatggaggtactggtaagactacctttgtgaagagacatctgaccggtgaatttgaaaaaaaatacattgcaactatcggagtagaagttcatcctctatctttttatactaatttcggtgaaattaagttcgatgtctgggataccgcaggccaagaaaaatttggcgggttaagggatggttattacatcaatgctcaatgtgcaattattatgttcgatgtcacatccagaatcacttacaagaacgtccctaattggcatagagacttagtccgtgtgtgtgaaaatattcccatagtgctatgtggcaataaagtcgatgtcaaagagagaaaggtcaaggccaagactatcactttccatagaaaaaagaacttacaatattatgacatttctgcaaaatccaattataattttgaaaagcctttcttgtggttggctagaaaacttgccggtaacccacaattggagtttgttgcgtctcctgcattggccccacctgaggtgcaagttgacgagcaactaatgcaccaataccagcaagaaatggaccaagccactgctttaccattacctgatgaagacgatgctgatttataaaaacatgaaaatttatatacgaaaatatt

SEQ ID NO: 2751 - DNA, 249 bp, Saccharomyces cerevisiae
aacaaattatacaaaatggctaaagttcacggttctctagctcgtgctggtaaagttaagtctcaaactccaaaggttgaaaaaactgaaaagccaaagaaaccaaagggtcgtgcttacaagagattattgtacaccagaagattcgttaacgttaccttggttaacggtaagagaagaatgaacccaggtccatctgtccaatagatactatctaaaattctatacttttattgttctacatgtgta

SEQ ID NO: 2752 - DNA, 816 bp, Saccharomyces cerevisiae
tcacgtaatttgcattataacgtaaaatggatttacccaaggacaaaagtgacagaactcatcaaagaattaatctaaataacagtgggacagatcgaactaatgatttgtaccttcatattgtccaaacgttcggttgcatagaaacaactgcaacggaaaatgccacgaaactgttaatgctgggtgacgtcgaagtagaaatatctgcgagcagcgtttcaattgagtggacacagaagtcaatgataagccaaacaattgccgatagtatagtaataatgatcatcggtttgtgtgcaagcgacaagaacgtgctatctgaatcagaattgaaagagagaaaccataacgtttggaagatccaagaattgcaaaatctgtttcgagaacaatttggagacagttttagcatcgatgaaggaataggaaaaaaagaaaatgtaaagaatggtagcgtcaccataggcaagagtaaagccacgatcgatttctccaccatgaagctgattgattgtaattcgaacccactaaagggaagagtggagagcatactaagcattggccagaaattaacaactccattgtgctgaacgtcattacttacctttttattttcttgtatgtgctttcatctgaattattggtggattatgtaacaagttgttgagttttccccatataactacttcgccaaggaaatggtaggtgcgggggcggagaacgcaaaccagcgtatctatggctaaataaggaagaagcaacaacactgttgtaattatgaggcatacatagacacagattcgtacattattt

SEQ ID NO: 2753 - DNA, 2077 bp, Saccharomyces cerevisiae
ggtcaagcaagaagacaaaccgcatacgccaagacaaaccgtggtgatttaattctgctgctgatcgcttccaacatgtacaatcctgtggacgctgttttaacaaagataattaccaactatgggattgatagttttacactgcgatatgctatctgcttattgggatcgttcccactgaatgctattttgaagagaattcccgagaagcgtataggtttaaaatgttgttttatcatttctatgtcgatgttttacttattcggtgtgctgaatctagtaagtggattcaggaccctgtttattagtaccatgtttacttacttgatctcaagattttaccgttccaagtttatgccacacttgaatttcatgtttgttatgggtcatttggcaataaatcatatacacgcccaattccttaacgaacagactcaaactaccgttgacattacaagttcacaaatggttttagccatgaaactaacttcttttgcatggtcgtactatgatggttcatgcactagcgaaagcgatttcaaagatttgactgagcatcaaaaatctcgtgctgtcagaggtcatccacccttattaaagttcctggcatatgcatttttctattcaacgttgctaactggcccaagtttcgattatgccgattttgacagctggttgaattgtgagatgttccgtgacttgcctgaaagcaaaaagcctatgagaagacaccaccctggtgaaagaagacagattccaaagaatggtaaacttgcattatggaaagttgttcaaggtcttgcttggatgattttaagtacactaggaatgaagcacttccccgtaaaatacgttttggacaaagatggcttcccaacgagatcttttatattcagaatccattacttattcttgcttggtttcatccatagattcaagtactacgctgcctggactatttcggaaggatcttgtattttgtgcggtttgggttataatggttatgattcaaagacacaaaagatcagatgggatcgtgtcagaaatattgacatttggaccgtagaaacggcgcagaatacgcgtgaaatgttggaagcatggaatatgaatactaacaagtggctaaaatactctgtttatttacgtgtcacaaagaagggcaaaaaacctggtttccgctcaactttgtttactttcctaacttccgcattttggcatggtaccagacctgggtactatctgacttttgcgacaggggctttgtaccaaacatgtggtaaaatctacagacgcaattttagaccaattttcttgcgagaagatggtgtcactcctttgccttctaaaaaaatctacgatttagttggcatatatgcaattaaactagcatttggttacatggtgcaaccatttattatccttgatttgaagccatctttaatggtatggggctctgtttatttctatgttcatattattgttgctttctcatttttcctattcagaggaccatatgctaaacaagttactgaattttttaaatccaaacaacctaaagaaatattcattagaaaacaaaagaagttggaaaaagatatttctgcaagctctccaaacttgggtggtatattgaaggcaaagattgaacatgaaaagggaaagacagcagaagaagaagaaatgaacttaggtattccaccaattgagttagaaaagtgggacaatgctaaggaagattgggaagatttctgcaaagattacaaagaatggagaaataaaaatggtcttgaaatagaagaggaaaacctttctaaagcttttgaaagattcaagcaggaattttctaacgctgcaagtggatcaggtgaacgtgtgagaaaaatgagttttagtggttactcaccaaagcctatttcaaaaaaggaagagtagatggccaaaaacgacagatgcgtgtggaagtcacagtcttgttgtcttattttccagttcctgtgggaacttactttcaaatgtttttcatacactttgacatattgcagtaaattatatatgtaattttatatacgctttt

SEQ ID NO: 2754 - DNA, 2105 bp, Saccharomyces cerevisiae
tgatcctggaggttatcaagaacacaaaagtctagcagcgaaaagtacgcgaagaatctactatagataatggtggtgcagaaaaaacttagggctatcttgaccgatgaaggtgtattgatcaaatcgcaatcacaccatatgttcaataagcatggtcaactcagaagcggagattctttatccttgttgagctgcttgtcctgtctggatgatggaactttgagctctgatggaggttcttttgatgaggatgattccctggaactgttgcctcttaatactaccattccgttcaacagaattttgaacgcaaaatatgtgaatgtcggtcagaaaggcttcaataatggcaaaatttcttcgaatccttttcaaacggaaaatctgagttcttcgtctgaaaatgacgacgttgagaatcatagtttgagcaatgataaggctcctgtaagcgaatcacagtcatttcccaaaaaagacaagtgggatacaaaaacgaacactgtgaaggtgtctcccgatgattcacaggataactcaccatctttagggataaaagataatcaacagttaattgagttaacttttgctgtacccaagggccatgatgttataccacaaaaattaaccttgttaatagatcacgtttctaggaaatcgagagcaaataccggagaggagaacatttcttctggtactgtggaagaaatcctggaaaaaagttatgaaaattccaagagaaacagatcgatattagtcattattaatccccacggtggtaaaggtactgctaaaaatttattcctgacaaaagcaaggccaatactagtggaaagtggctgcaaaatagaaattgcatacacaaaatatgcccgtcacgccatcgatattgccaaagatttagatatcagcaaatacgataccattgcatgtgcctcgggtgatggtattccatacgaagtaattaatgggctttatagaagacccgacagagtggatgcgttcaataaactagccgtaactcagctaccttgcggttcaggaaatgctatgagcatttcatgtcattggacaaataacccatcgtacgccgctctgtgccttgtcaaatccattgaaacaagaatagacttaatgtgttgttcccaaccttcttatatgaacgaatggccaagattatcctttttgagtcagacgtacggcgttattgcagaatctgatattaacactgaattcatcagatggatgggtcccgttaggtttaatttgggtgtagcattcaacattatccaaggtaagaaatatccctgcgaagttttcgtcaaatatgctgccaaatctaaaaaggaattaaaagttcatttcttagaaaataaagataaaaacaaaggatgtttaaccttcgaaccaaatcctagcccaaactcttcgccggatttactatctaaaaacaatatcaacaacagtacaaaagatgaactttcaccgaattttctcaacgaggacaactttaaattaaagtatccgatgacggaaccagtacctagagactgggagaaaatggattcagagctaactgataacttaacaatcttttacacagggaaaatgccgtatattgctaaggacaccaaattttttcccgctgctttaccagcggatggtaccattgatttagtcataacggatgcaagaatcccagtgacaagaatgacaccaattttattatccttggataaaggttctcatgtattagagccagaagttattcactcaaaaatattggcttataagattataccaaaagtggagtcaggtttattttcagtggatggtgaaaagtttcctttggaacccttgcaagtggaaataatgcccatgttatgcaagacgttgctaaggaatggtagatatatcgatacagagtttgaatccatgtagattaacgttatattttccttcaaaaatgatttttttgtaaaaagaaatactacatcgaaaagaaaaggcgatataatgtttctatcatcggagtatggtttatattccatttttgttttcattataattatacatccccagttatatatcattaatacgta

SEQ ID NO: 2755 - DNA, 318 bp, Saccharomyces cerevisiae
caagctagcaatcatggataacaaaaccccagtcactttagccaaggtcatcaaagttttaggaagaaccggttctcgtggtggtgtcacccaagtccgtgtcgaattcttggaagacacttccagaactattgtcagaaacgtgaagggcccagttagagaaaacgacattttggttctaatggaatctgaacgtgaagctcgtcgtttgcgttaggaagcttatttgcagattgaaggttgcagctatacaaaatctatcttatatatttgtgccttttgtttcttatatatgtcttctttaaatagtacatcact

SEQ ID NO: 2756 - DNA, 1074 bp, Saccharomyces cerevisiae
gacataaataataataacaagctatggttcctgctgaatctaatgctgtacaagcgaaactcgctaaaaccttacaaagattcgaaaataagatcaaagctggagattattacgaagcgcatcaaacgttgagaactattgctaatagatatgttagaagtaaatcatacgagcatgccatagaactaattagtcaaggggccctttcatttttaaaggcgaagcagggcggttcaggcacggatttgatcttctatcttttagaagtttatgatttagcggaagttaaagttgatgacatctcagttgctagattggttagattaatagccgaattggatcctagcgagcccaatttaaaggacgttattactggtatgaacaattggtctatcaaatttagtgaatacaaatttggagatccttacttgcacaacaccattggtagcaaactattagagggagatttcgtttatgaagctgagagatattttatgttaggtacacatgattcaatgatcaaatatgtcgatttactatgggactggttatgccaagttgatgatatcgaagatagcacggtggctgagttcttcagcagattggttttcaactatttattcatctctaacatatcatttgcacatgaatcaaaagacatttttttggaaagatttattgagaaatttcaccccaagtacgagaaaattgataaaaatggttatgaaatagttttttttgaagattattccgacctaaattttttgcaattgttgctaattacctgtcagactaaggataagagctatttcttgaatttaaagaaccattatttagatttttctcaagcttacaaaagtgagttagaatttttgggccaggaatatttcaatattgttgctcctaaacaaacgaatttcctacaagacatgatgtcgggattcctgggcggatcgaagtgaaaagagcatatttgcgaaggaatagataaatatgtttgcggtggcttgacgaccatgacgtatatacatatatatgtatgtgctagctatttgtcgtctttaatgatagcag

SEQ ID NO: 2757 - DNA, 1620 bp, Saccharomyces cerevisiae
atgccattgaatgaaaaatacgagaggcctccgcaacctcctccagcatatgatcccaaccataggccgcccagttcttccgagaactctgccgcggcgaatgtcaacgatggccagacgccgtaccattttagacaggatcaatattacaatctaaattccaaaacgagtggggctcctatagggagcttcgacgaggcctttcctactgaaaatgacaacaagcccaggtggaacgattggccatttaccatttttttcctatgcacggtaggcggattcatcgccattgctgccataaccttaagagcgtggtcccaaacctatagcagtacgggttccggaatatacgatggtgtgaatactggtacgctgaacaccaatgctgccatcctgctagttttcgtgtgcattattgccctagtattctccgttttgggcctcacactttgtcgaatttttccgaagcagtttatatattgcggtatggtcatcaacctagtggcttctcttgggactgccatcatgtacatgtctttgaggtactggtctgcaggtattgtgtttttagtcttcacgttcatgaccgcgtggtgctactggggtatgaggtctagaattcccctttctgtggcggtattgaaagtcgtcgtcgatgccatgaagaaatgcccacagatcttctttgtttcatttgttggagcgctagttgctagtgcgtttgggtttctcttctcagcagtcattgtggctacgtacataaagtacgatcctaatagctcgaatggcggctgtgacgtttctggtggcagctgttcgcattccaaattgattggtgttttggttgtggtttttttctgcggctattatatctctgaagtaataagaaacgtcatacattgtgttatttctggcgtctttggcagctggtattatatgtcaaagtctgaccaaggaatgccaaggtggcccgcatttggagcattgaagagagccatgacttactcgttcggttccatttgctttgggtccttgctagtcgctttgatcgacctgttgagacaaatattgcaaatgatcagacacgatgttacctccagcggtggcggtcaaattgccatccagattttgtttatggtgtttgactggattatcggctttctgaagtggctcgccgagtatttcaatcattatgcatactcgttcatcgctctttatggtaaaccgtatttaagagcggccaaagaaacctggtatatgttaagagaaaagggaatggacgccctaatcaatgataatttaattaacattgcactgggtctattttcaatgtttgctagttatatgaccgctttgttcacgttcttgtatctaaggtttacctcgcctcaatacaattcgaacggcgcttacaacggcgccctaatggcattctcatttgttattgctttacagatttgcaacattgcaacagaagccattagatccggtactgcaactttctttgttgctcttggtaatgacccggaggtcttccatcattcttaccctcataggtttgatgagatttttagggcatatcctgatgtactcagaaaattgagtcaccagaatgtgtga

SEQ ID NO: 2758 - DNA, 285 bp, Saccharomyces cerevisiae
atgtcgaacaaagttaaaaccaaggccatggtgccaccaataaattgcatatttaacttcttacaacagcaaacaccagtaacgatatggttattcgagcaaatcggcataagaatcaagggtaaaatagttggatttgatgagttcatgaatgttgtcatcgatgaagccgtggaaattcctgtgaatagtgccgatggtaaagaagatgtggagaagggcacgcccttggggaagatcctgttgaaaggcgataatatcacattgataacatcagcggactga

SEQ ID NO: 2759 - DNA, 857 bp, Saccharomyces cerevisiae
tccccccacataaacctgattgtagaaaatagaattgagtgagcatggcaggtttatcgttcgacaattatcaaagaaataatttcttagcggaaaactcgcacacacaacctaaggcaacttccacgggtaccaccattgtaggcgtaaaattcaataacggagtggtgattgcagcagatacaagatcaacacaaggtccaattgtcgcagataagaattgcgcaaaattgcatagaatttcccccaaaatatggtgtgctggtgccggtaccgccgccgatactgaggcagttacgcagttgatcgggtctaacattgaattacattccttatatacctcgagagaaccaagagtggtctcagctttacaaatgctaaagcagcacctatttaagtaccaaggtcatattggtgcttatttgattgttgcaggtgtagaccctacgggatctcatttgttctccattcatgcgcatggttctactgacgtgggctactacctttctctaggatctggttctctagcggcaatggctgtgttggaatcacactggaagcaagaccttacgaaggaggaagccataaagttggcctctgatgcaatccaggctggtatctggaatgatttggggtctggttctaatgtggatgtgtgtgtcatggaaataggtaaagatgcagaatacttgaggaattacttgactccaaatgttagagaagaaaagcagaaaagctacaaattccccaggggtacaactgctgtgctgaaggagagtattgtcaatatttgtgacatacaagaagaacaagtcgatataacggcttgaaagtaaaacatagaacttaagtatatt

SEQ ID NO: 2760 - DNA, 1605 bp, Saccharomyces cerevisiae
ctgcagtgataggtttctatagatttctctgtatacttcctgtattacactataatatttcatgtcctttcacttcccacgtttagcgggacaggccgcccttaaattaacaaaatttaaaaggtaaaggaatgtactaagaaaagaaaactattcaaagaaagtaacaaaagatcgtgagttaacttataatagcaatgtcctcaagatatagagtggaatatcatttgaagagccaccgcaaggatgagtttatagattgggtaaaggggctactggcctcaccttttgttctacatgccgtctctcatgaaggtgactacaatgacgacttagcaacaactcaacgtgtaaggtcgcagtatgctgatatctttaaagacattgaagggctgattaaagataaaatagaatttgactcaagaaacatgagccaagacgaaattgaagatggcgcctcttctcaatctctgaatatattaggacaatcgcgtttaaatcttttggttccatcaattggaacattctttacggaacttccattggaacaagcttttctatgggaagactcacaacgggccatttcggcgcgtagaatggtagcacccagttttaatgatatcaggcatatcctgaatactgcacagatatttcactttaagaaacaggagaacttacataatggtaaggttttgagattagtgacttttgatggagatgtgacgctgtatgaagatggtggctccctggtttacactaatcctgtaattccttatattctcaagctgttgcggtgcggtatcaatgtgggaatagtcactgcggccggatatgatgaagctggaacctatgagaacagattgaaaggattaattgttgcattacatgattcaactgatataccagtttctcaaaagcagaatttaacaataatgggtggtgagtcgagttaccttttccgttactatgaagacccggaggaagataactttggctttagacaaattgacaaagaggaatggctattgcctagaatgaaggcttggtccctcgaggacgtggaaaagactttggactttgccgagagaactcttaacaggttaagaaaaagactaaacctaccttcagagatttctattatccgtaaagtcagggcagtgggtatcgtcccaggcgaacggtacgatgaagcttctaaaagacaagttcctgttaagcttgatagggaacaactggaggaaatagttttaacccttcaaaacactttagagtcttttgccccatctagaagaattcaatttagttgttttgatggtggtagtgatgtctggtgtgatattggggggaaagatcttggtgttcgttcattgcaacaattttataaccctgaatctcctatccaaccctctgaaaccttacacgtaggcgatcagtttgcaccggtgggatcagcaaatgattttaaggcaaggctagctggatgtaccctctggatagcatcccctcaagaaacagtgaattatcttcatagattattagaaactgattaaaacagtttatgtaaaatgaaattaggactataaaagtatatagatatttcctata

SEQ ID NO: 2761 - DNA, 1137 bp, Saccharomyces cerevisiae
aatcgtacaaaagataatatgtggaaacaactttcctaagcagcgaaatacacgtgcaagagcaacgttatatcatttcgatttcatttaatttgatctggctcgacattagtatttcaaatcgaggataagatttttgtagtgctctttttttctatcttttagctaaggttcctaacgttctttctgctgtgcttcactccaccatagaaaactaatgtttaatttaattttatggcccttatttttgcttacctcagttgccattcctttgcagctgacattagaagtggtctatctgacgtcttccgttgacttctcaaaggcaagtgctgctaaaaccgctacttctttgggtcagtccccagttgtcatcaccatttataaatcactgttaaaatattggagtctttacgagttcatacattttatttacctctatactcctattgatgcctttctgaatttcttaccatttacctctttacttatgtcgtttggaagtatttgcttgacaagagagctggtatatgacttcattgcctttatggaatctcaaaacaagcttaccggattccttaataagataacagaaccgaattttaacagttatttactgttttcttcaatttataacatttggtttgcagatgacaccaatgacaaattcttattcggtaaattaactcagattttaatatctgtaacaaaaaggtacgaatttccaagaacattctacttagcaaaagtttctgatttcctacaaaatctcattctaacgagattgagaccctttgtaacggagcaaccccaaggcgacaaaaatcgctatcaaaacggtgaccgtgaatctacaaagaatggagctgcttatcagaagtcttcacaacaatcatcgtctttcgaacaaaattttaccagcactgagttcccgaatgattatgattttatggaggatattctagatgagacaactgaattggattagaatagtttttccattttaccataatggtagtctatgaaggtacctaatttttcatagacacaaaacaaagttcaggcgacgaaacacaaaaatcgccatatatatttacgcatatgtatgcattctaggaaacagaaaaaaataaataa

SEQ ID NO: 2762 - DNA, 3971 bp, Saccharomyces cerevisiae
taaaagctagtgatttgtctaagtagggagcagctttataaagttagggtacttggatattgcactcattccttctcctcaggtttacagatagttcgaataatttttgcttatcgtatatttcttaaagaagaacccaacagtaaggaacaaacataaggaacacgacagcggaataagacactgtagaagctccgtattataaaaattaggaccagaaaaagaacacaaacaagtatagaaaaataattataaggatgtcagaccttgcaaactcagaaaagtattatgatgaggacccatatggattcgaggatgaaagtgcaccaattactgcagaagattcgtgggctgttatatccgctttttttcgcgagaaggggctagtttcacaacaacttgactctttcaatcaattcgttgattatactttacaagacattatttgcgaggattccaccttgattttagagcagttggctcaacatactaccgaatcagacaacatcagtagaaagtatgagattagttttggtaaaatctatgttacaaagccaatggtaaatgaatctgatggtgttacccatgcgttgtatccacaagaagcacgtttacgtaatttgacatattcgtctggtttatttgttgatgttaagaagagaacatatgaagctattgatgttccaggtagggaactgaaatatgaattaattgccgaagaatctgaagatgacagcgaaagcggaaaagttttcattggccgtttaccgattatgttaagatcaaagaattgttacctaagtgaggctacagaatcagatttatataagctgaaagaatgtccctttgatatgggtggttatttcatcattaatggttctgaaaaagttttgattgcacaggagcgttctgcaggtaatattgttcaagtgtttaaaaaagccgccccatctccaatttctcatgtagcagaaattagatctgcccttgaaaaaggttctaggtttatcagtacccttcaagtcaagctttatggtcgtgagggtagttcagctcgtactattaaagccacattaccatatatcaaacaggatattcctattgtaatcatattcagagctttaggtattattccagacggtgaaattttagaacatatctgctacgacgtaaatgattggcaaatgctggaaatgcttaagccttgtgttgaagacgggtttgttattcaagatcgtgaaactgcattagactttattggtcgtcgtggtactgcccttggtattaagaaagaaaaaagaatccaatatgcaaaagacattttacaaaaagaattcctacctcatattactcaattagaaggttttgaaagtagaaaggcatttttcttaggttatatgataaacagattattactgtgtgctttagatcgtaaagaccaagatgatcgtgatcatttcgggaaaaaaagattagatttggcaggtccattattggcccaacttttcaagacattgttcaaaaaattaactaaagatattttccgttatatgcaaagaactgtagaggaagcccatgactttaacatgaaattagcgattaacgcaaaaaccataacatcgggtcttaagtacgctttggctactggtaactggggtgaacaaaaaaaagccatgtcttctagggcaggtgtttctcaggttttgaaccgttacacttattcatccaccttatcacatttaagaagaacaaatacccctattggtcgtgatggtaaattagccaaaccacgtcaattgcataatacacattgggggttggtctgtcctgcagaaactcctgaaggccaagcgtgtggtttagttaagaatctgtcactgatgtcttgtatttctgttggtacagatccgatgcctatcatcacttttttgagtgaatggggtatggaaccactggaagattacgtaccacatcaatcacctgacgcgacaagggtcttcgtcaatggtgtttggcacggtgttcacagaaacccagcaagattaatggaaacccttagaacattgagaagaaagggtgatatcaatccggaagtttctatgattagagatattcgtgaaaaggagctaaaaatctttacagatgccggtagagtttatagaccattatttattgttgaagacgatgaatcactaggccataaggaattaaaggtaagaaagggtcatattgccaaactgatggctaccgaatatcaagatattgaaggtggatttgaagatgtagaagaatatacatggtcatcattattgaatgagggtttagtggaatacattgatgctgaagaagaagaatctatattgatcgcaatgcaaccggaagatctcgagcctgcagaggcaaatgaggaaaacgatctcgatgttgatcctgccaaacgtataagagtatcacatcatgctacaacatttacacattgtgagattcatccttctatgattctcggtgtcgcagcatccattattccattccctgaccataatcaatctccgcgtaacacttaccaatctgcgatgggtaagcaagctatgggtgtgtttttaacaaactataatgtgcgtatggatactatggccaatattctatattatcctcaaaaaccattgggtactacacgtgcgatggaatatttgaagtttagagaattacccgctggtcaaaatgcaattgttgctattgcatgttactccggttataatcaagaagattctatgattatgaaccagtcttcaattgatcgtggtctattcagatctctgtttttcagatcttatatggatcaggaaaagaagtacggtatgtctataacggagacttttgagaaaccacaacgtacaaacaccttaagaatgaaacatggtacatacgataagttggacgatgatggtctaattgcgcctggtgttagagtttcaggagaagatgtgattatcggtaaaaccacaccaatctcaccagatgaagaggaactcggtcaaagaacagcataccattccaaacgtgatgcttccacaccattgagaagtactgaaaacggtattgttgatcaagttttagtcacaacaaaccaagatgggttaaagtttgtcaaagttcgtgtaagaactacaaagattcctcaaattggtgacaaatttgcttctcgtcacggtcaaaagggtactattggtatcacatatcgtagagaagatatgccatttaccgcagaaggtattgttccagatttgattattaaccctcatgctattccatctcgtatgactgttgcccatttaattgaatgtttgttgagtaaagtcgcggcactatctggtaatgaaggtgacgcctctcctttcacggacattactgtagaaggtatatccaaactactgcgtgagcatggttatcaatctcgtgggtttgaagttatgtataatggtcacacaggtaaaaaactaatggctcaaattttctttggtcctacatattatcaacgactaagacacatggtggatgacaagatacatgccagagcacgtggtccaatgcaagtattgacgagacagcctgtagagggtagatcgagagacggtggtttaagattcggtgagatggaacgtgactgtatgattgctcatggtgctgcctcattcttgaaggagagattaatggaagcatccgatgcctttagagtccatatttgtggtatttgcgggctgatgacagttatcgcgaaattaaatcataaccaatttgaatgtaagggatgtgataataagattgatatttaccaaattcatattccatacgccgcgaagttattattccaagaacttatggctatgaacattacaccacgtttatataccgatcgttcgagagatttttaagaaataatgttgtaactctaagaaagtaaaataataaaa

SEQ ID NO: 2763 - DNA, 1627 bp, Saccharomyces cerevisiae
atagtattcttactcgcaagcacacatcaggtacttggaagtgtatgatgaggtatcaatggtggctttatttagtatatgccatcggcctaatgctatgcctaggcccgtcgtatattcatccagatgaacatttccaatgcatcgagattttggctatgcagttcatgaaggtcaaaggtaccatcccatgggaatttaaatcaaaatttgctgctaggagttacggccccctattattggtttacgggcctttgttcactattttagaatcttttcccgaaattcaggacaacccagcgttaattctgtattcgatgagactacaaaactatgtgatgtacctattgtgctatcattttttaatacctaaattaataagggatgagagaaaggctgtacaattcatgcaaaaaagtctacttttaacttcttacgtaacctggacgtaccaaacacacacgttttccaattccatagaaacgctggctttaatctcaactttaactgtaatggaagatatggtaaacgaaaaaaatattcaaagaagtaatttcaaaaattcggttatattgggacttatatttagttttggtgtttttaatagagttacttttcctgcatttattttcttaccatgtttgatattattctggaagttttaccgggtccattggaaatccttttctttacttttactttcattttcattttcctcgtgtctatttgttcttattgatacaaatatttataacaacggaaagggatttgtcattacgcccttgaataacctgaaatacaacctcaatgtccaaaatttgcaagtacatggattacatccaagatacacccatctgctggtcaatttacctcaaatagttggcccagtattgctgctagcgattttttccggttacaaactcgataaattatctacttacgcaatcatatctggcctgctttttctttcattctttcaacatcaagaattaagattccttgtaccgctagtgccactactcgtgacaaacttaaactggacacctctgagttccacgttagtaaacaagaaaattttcaagggaacttggcttctttttaacataatcatggcgttcatcatgggaatttcacatcaagcaggaattatccaatttttgggagattacttccactttcgtaccgaacaaatgggcgttcacatatggtggaaaacatactcaccacccacctggatgtatatgagcaataacctaaccgtttcttctcttatcaatacacaggatggtattgagtcgatagatgaagtggcattcagtgtaggtaaccatcatgtaatagaccttaaaggctgtgatttaccacttttaacagaaacaattaggcggctgcgtttaaacgggtccataactccactaactttagtaactcccaattccatgacatcagaattgaaaaagttgaagagagatggcactattaacttaatacccaaaagaaattacttgttccatttggatttggatcatcttgatttcaatgatttcacgacttttaagccagggctaacagtgtactccatcgaactactataagaccagctatatgaggagttatgcatatatta

SEQ ID NO: 2764 - DNA, 895 bp, Saccharomyces cerevisiae
atggttgcgcctactgctttgaaaaaggctactgtgacacctgtaagtggacaagatgggggcagtagtagaattataggaataaataataccgaaagcatcgatgaggacgatgatgacgacgttctgttagatgattccgacaataacacagcaaaagaagaggtagagggcgaagaaggtagccggaaaacgcacgaatctaagaccgtagtggttgatgaccaggggaaacctcgcttcacttcagctagcaaaacacagggtaacaaaataaaatttgaatcgagaaagatcatggttccaccacacagaatgacacccttgaggaacagttggacaaaaatttatcctcctttggtcgagcacttgaagctgcaagtcagaatgaatttaaagaccaaatccgtagaactaagaacgaatcctaaatttaccacagaccctggtgcgttgcaaaaaggggccgattttatcaaagcctttaccttagggtttgatcttgacgattctatcgcactattgaggctagatgatttatatattgagacttttgaagtcaaagatgtcaagactctaacaggtgaccatttgtcgagagccatcggtcgtattgccggtaaagacggtaaaacgaaatttgcgattgaaaacgctacaagaacaagaattgtcttagctgactctaaaatccacattttgggcgggttcacccacatcagaatggcaagagaatctgtggttagtttaattttgggttcccctccaggtaaagtttatgggaacttacgtaccgttgcatctagattaaaagaacgctactaaacataatttgtgggctttcatcatctgtataatatttatatgtcgttttatggcgaaatagagtgaataa

SEQ ID NO: 2765 - DNA, 2100 bp, Saccharomyces cerevisiae
cttaagtaattgatttttgttaagtaagctacgatgatggataatcaggctgtaaagtcactgctagaaatgggtattccacacgaagtagctgtggacgccctccaaagaactggcggtaatttggaggcagcagttaacttcatcttttcgaacgagctgccggagcaagcggaaatgggtgaggagaatgatggcagtcagcctaggatttctgagaacaaaatagtggctggaaccaagccctgcgatgttccgaacaacggggaccaagacattgatatgccggatgtgagtggtgtcgatgttgattatgatgacgatgaagacatcacggatgaacgcagcggttctaatagcaccagcggatgcagggttactgctcagaactacgatcgttattctatatcggagacatccattcctcccccctcttatagtatagtacaacacaacgagttcaagtcgaacgtgggcgatcctacggttgtgttgccgctacccttgaatagtctaattgagagctattttgggctgtttgcgttgctcacggccgtgtatttcccacacgtgttcttgaaaccggactttaaggatttgaactatagggcagactggttcaagggctcatcgtttacggagcccaaatacagacttgcatattgcgaggcagaagatggttccactacgtcggagatcgtgctggccagcggacctaatgaagggttgcaaccgcatctgctctggcagttgcaaaaactcatctccgtggttaacacgcgaaagtgtgaaagagcctttgtttcggccaaggtgtttacgtcgtccttggaaccgcaattgaggtccaagctggccgattccgagcatctttatgaggtgctcccagcgtttatcaaatcattggcagtggatttggaaatgtgtcctgggatcagagaccgggaaacaagaagtctctttatatcttctgctttgcatactccgaacaagaatgaacctccaatggagacgtttttgtccttgtttcattttcttcctgaagagtacgattctaatctatataaaatgttcaacgttttattgtaccccgaagaagaggaagaagaagaagacgtgattcgtggtggcgagcaagaagaggcgagatatgtggaaccggagaatactttgaaggaggtggcacccgtattaacaatcctgttcaatgaactagaaacaaatacagaatcagtgtctctacccaatggcgtggatataccgcttgagttttacccacagctttacaccaaacagtgcaaagaccaactaataagacatattatttctaaacgaaagcaagcgcggaccagatccagatgcttgcttcaagagatcaacgagttaaagagttaccaaggcaaaaacatatccactattctagagtcgacgctggcgtatctacaaacaattcctgacgatgctaataatgaagcagcaaagcagatcgcatcgttgaaagatacattaaattctgcgagagccgctaaaatggaggaatataaggacttggcgtccaaactgcatggagaatggaacctttcacatccagagacacacataatcaacactgcaaagcaattgggactgatcgaaaatccctacatcctcacaatggcagcactatcgccatattcatactttatcagaagcagaaacggtgcatggtcatggatacaaagtaatacgttgggaacagaattcaaggtgaaaaaatgttcgtcgccttctgtcgttcaagaagccatcaagcatggcacgaagtacgcaagtgaaactccgctgatgttcatatactgtgaagagggtaaaattcccacggaagaagtagtcgcggaagcgttgaaaagcaatagcgggtgcttaaaatttgctgaggatgaccaaaattcattaaaaacattgcgttcgcaatttttcgatggtatgggagatcctgaacaagccaccaacaatattaacaatggtaacgataatgacaatgacgatgacatcgattctgataattagatagatttctatacactttccgccagataaataacgtatgtctctttaaac

SEQ ID NO: 2766 - DNA, 855 bp, Saccharomyces cerevisiae
acaatcattaggatagtcgggcaatatatacggttcaatagtcactgaaagtgtatcacagaataatgacaaagctacaaggactacagggattaaaacacatcaaagcggttgtatttgatatggatggcacattatgcctaccccagccttggatgtttccagcaatgagaaacgccataggattggaggacaaatcgattgatatccttcatttcattgatacattgcccacagaaaaagaaaaaaaagaagcgcatgatagaatagaattagttgaggcaaaagccatgaaggagatgcaaccgcagcctggtctggttgacataatgaggtatttgacgaaaaatggtattagcaagaacatatgtactagaaatgtcggagccccggtagagacttttgttaaaagatttattccatccgagctttcgaggtttgactatattgtgacaagggagtttaggcctacaaaaccgcaaccagacccattattacacatcgcctcgaagctaaatataaggcccttggaaatgatcatggtaggagattcatttgacgacatgaaatccggtagatctgctggatgtttcacggtattactcaagaatcatgtgaatggacatttactgctcgaacataaagaactagtagacgtttcagtagaggatctttccgaaataattgaattgattcaaaatatgaataaagaaagtttctaaaaaaaaaaaaactttacttagatatgtacatatgattgaaataccattttattcttagatgttttttagagctaatatagtagctatggcggaattaccttgattttttcggcatcacaaagttcgagaacac

SEQ ID NO: 2767 - DNA, 1787 bp, Saccharomyces cerevisiae
gacaaaacaatcaagtatggattctagaacagttggtatattaggagggggacaattgggacgtatgattgttgaggcagcaaacaggctcaacattaagacggtaatactagatgctgaaaattctcctgccaaacaaataagcaactccaatgaccacgttaatggctccttttccaatcctcttgatatcgaaaaactagctgaaaaatgtgatgtgctaacgattgagattgagcatgttgatgttcctacactaaagaatcttcaagtaaaacatcccaaattaaaaatttacccttctccagaaacaatcagattgatacaagacaaatatattcaaaaagagcatttaatcaaaaatggtatagcagttacccaaagtgttcctgtggaacaagccagtgagacgtccctattgaatgttggaagagatttgggttttccattcgtcttgaagtcgaggactttggcatacgatggaagaggtaacttcgttgtaaagaataaggaaatgattccggaagctttggaagtactgaaggatcgtcctttgtacgccgaaaaatgggcaccatttactaaagaattagcagtcatgattgtgagatctgttaacggtttagtgttttcttacccaattgtagagactatccacaaggacaatatttgtgacttatgttatgcgcctgctagagttccggactccgttcaacttaaggcgaagttgttggcagaaaatgcaatcaaatcttttcccggttgtggtatatttggtgtggaaatgttctatttagaaacaggggaattgcttattaacgaaattgccccaaggcctcacaactctggacattataccattgatgcttgcgtcacttctcaatttgaagctcatttgagatcaatattggatttgccaatgccaaagaatttcacatctttctccaccattacaacgaacgccattatgctaaatgttcttggagacaaacatacaaaagataaagagctagaaacttgcgaaagagcattggcgactccaggttcctcagtgtacttatatggaaaagagtctagacctaacagaaaagtaggtcacataaatattattgcctccagtatggcggaatgtgaacaaaggctgaactacattacaggtagaactgatattccaatcaaaatctctgtcgctcaaaagttggacttggaagcaatggtcaaaccattggttggaatcatcatgggatcagactctgacttgccggtaatgtctgccgcatgtgcggttttaaaagattttggcgttccatttgaagtgacaatagtctctgctcatagaactccacataggatgtcagcatatgctatttccgcaagcaagcgtggaattaaaacaattatcgctggagctggtggggctgctcacttgccaggtatggtggctgcaatgacaccacttcctgtcatcggtgtgcccgtaaaaggttcttgtctagatggagtagattctttacattcaattgtgcaaatgcctagaggtgttccagtagctaccgtcgctattaataatagtacgaacgctgcgctgttggctgtcagactgcttggcgcttatgattcaagttatacaacgaaaatggaacagtttttattaaagcaagaagaagaagttcttgtcaaagcacaaaagttagaaactgtcggttacgaagcttatctagaaaacaagtaatatataagtttattgatatacttgtacagcaaataattataaaatgatataccta

SEQ ID NO: 2768 - DNA, 834 bp, Saccharomyces cerevisiae
gtacgcttaaactgtgaccaaatatggattacgagaagtttctgttatttggggattccattactgaatttgcttttaatactaggcccattgaagatggcaaagatcagtatgctcttggagccgcattagtcaacgaatatacgagaaaaatggatattcttcaaagagggttcaaagggtacacttctagatgggcgttgaaaatacttcctgagattttaaagcatgaatccaatattgtcatggccacaatatttttgggtgccaacgatgcatgctcagcaggtccccaaagtgtccccctccccgaatttatcgataatattcgtcaaatggtatctttgatgaagtcttaccatatccgtcctattataataggaccggggctagtagatagagagaagtgggaaaaagaaaaatctgaagaaatagctctcggatacttccgtaccaacgagaactttgccatttattccgatgccttagcaaaactagccaatgaggaaaaagttcccttcgtggctttgaataaggcgtttcaacaggaaggtggtgatgcttggcaacaactgctaacagatggactgcacttttccggaaaagggtacaaaatttttcatgacgaattattgaaggtcattgagacattctacccccaatatcatcccaaaaacatgcagtacaaactgaaagattggagagatgtgctagatgatggatctaacataatgtcttgaatgcagtaatcctttgtacgtactctgtctatatttccctaacttttaagcaactgtataatttttcatatacgggattttcaggaaaaaaaac

SEQ ID NO: 2769 - DNA, 867 bp, Saccharomyces cerevisiae
caattcaaggaataaagatatcacgtatacgggagagatacatagaaattatgttatcccgtgtttcagttttcaaacctgccagcagaggcttttccgtcttatcatctttaaagataacagaacatacatcagcaaaacacaccgaaaaacctgagcatgctcccaagtgtcagaatttatcagatgctcaggctgcatttttggaccgtgttattcgtgtagatcaagctggcgaattaggtgcagactacatctacgctggccagtacttcgtgttggctcataggtaccctcacttgaaacctgtgctaaagcacatatgggaccaggagatacatcatcataatacttttaacaatttgcaattgaaaaggagagtcaggccttccttattaacgcctttgtggaaggcaggagcctttgcaatgggggctggtaccgcattgatttctccagaagcagctatggcttgtactgaagctgtcgagacagtaatcggagggcactacaatggccaattgcgaaacttggccaatcaattcaatttagaaagaacagatggaacaaagggtccaagtgaggaaatcaaatccttaacttctactatccaacagttcagggatgacgagctagagcatctagacaccgctatcaagcatgattcgtatatggcagttccatatacagttatcactgaaggtattaaaacgatttgcagagtagctatatggagtgccgaaagaatttaaccaccagaaagtggcatacatcagtcgcgttatgccagaaaaggagaattgaaaggaaaacggtttgataaatgtcctaattaaactatcatgtataaaattatgtatcatcctt

SEQ ID NO: 2770 - DNA, 582 bp, Saccharomyces cerevisiae
tacatacacaacataaacccaactacgatcgcaaattatgtcttggcaagcatacactgataacttaataggaaccggtaaagtcgacaaagctgtcatctactcgagagcaggtgacgctgtttgggctacttctggtggcctatctttgcaaccaaacgaaattggtgaaattgttcaaggcttcgacaatccagctggtttgcaaagcaatggtttgcatattcaaggccaaaagttcatgttgttgagagctgacgatagaagtatctacggtagacatgatgctgagggtgttgtttgtgtaagaactaagcaaaccgttattattgctcattatccaccaaccgtacaagccggtgaggccaccaagattgtcgagcaattggctgactacttgattggtgttcaatactaatttatgcaggtaaagttttcttgccttatacaccacctattctggcatctgcgggatttcgcttcctattttacaaatattttattgattgacgctaattatcactgtaaaaggcgcactttttatatgtagtcacatccggtatttaacatatttacgaaaca

SEQ ID NO: 2771 - DNA, 4727 bp, Saccharomyces cerevisiae
gcttaccttactattctttgcatatattaatcgtacaatatcgttgatttggggaagattgcttagtttgttgtggctagagtttttgttgattgcagacagtatactagatcatttttttcttttccatctgcactaaatttttaaactcatcactggttggttacatagttgttcctttattgtgttcaatactatctgctttctccaaaactgtaagcgagtcccgcaatttcgaagaattcgatgaaggaagtcgttgtaagtgaaaccccgaaaaggattaaagggctggaatttagcgctttaagcgctgccgatattgtcgcccagtctgaagtggaagtgtctacaagagatctcttcgatttagaaaaagatcgtgctcctaaggcgaacggtgctttagaccccaagatgggtgtctcttcctccagtcttgaatgtgcaacctgtcacggcaacttggcatcgtgtcatggccattttggtcacttaaaattagctttgcctgttttccacattgggtacttcaaagccaccattcaaatactgcaaggtatctgtaaaaactgttctgccatattgttatcagaaacagataaaagacaatttttgcatgaacttcgtcgtccaggcgtagataatttaagacgtatgggtatattgaagaagattttggaccaatgtaaaaagcaaagaaggtgtctgcattgtggtgctcttaatggtgtcgtgaaaaaagccgctgctggtgctggttcagccgcgttgaagattatccatgatacatttcgttgggtaggtaaaaagtccgctcctgaaaaggatatttgggtgggagaatggaaggaagttcttgctcataatccagaactagagcgttatgtgaaacgttgtatggatgatttaaatccactgaaaactttaaatcttttcaagcaaattaagtctgcagattgtgagctgcttggtatagatgcaacagttccctctggtagaccagagacttacatatggagatatttacccgcacctccggtttgtataaggccttccgttatgatgcaagactctccagcatctaacgaagatgacttgacagtaaagcttacggaaatagtttggacttcgtctttaatcaaagccggtcttgacaagggtatttccattaacaatatgatggaacattgggattacttacaactgactgttgcaatgtacatcaactcagactcagtcaatcctgcgatgctaccaggttcatccaatggcggcggaaaagtgaaaccaattagagggttctgccaaagactaaagggtaaacaaggtcgattcaggggtaatttgtctggtaagcgtgtcgatttttctggtagaactgttatttctccggacccaaacttgtccattgacgaggttgctgtcccagatcgtgttgcaaaagtcttgacgtatcccgaaaaggtaacaaggtataatagacataaattacaagaattaattgtaaatggacccaatgtccatcctggggcgaactatttactgaaaagaaacgaagatgcaagaagaaacctaagatatggtgatcgtatgaagttagccaaaaatttacaaattggtgatgtcgtcgaaagacatttagaagacggtgatgtggtcctattcaaccgtcaaccatctttgcatagattatcaattttatcgcattatgctaagattcgtccttggagaacctttagattaaatgaatgtgtttgcacaccttataacgctgacttcgacggtgacgaaatgaatttgcatgttccacaaaccgaagaggctcgtgcagaagctatcaatttaatgggtgtgaaaaataacttattaacacctaagtcaggtgaacctattattgcggctactcaagatttcataactggttcatatttaatatcacataaggattctttctatgatcgtgctacattaactcaactattgtctatgatgtctgacggtatcgagcactttgacataccacctcctgctatcatgaaaccgtattacttatggaccggtaaacaagttttttcacttttgataaaaccaaatcacaattccccagttgtgataaacttagacgcgaagaacaaagtctttgtccctccaaaatcaaaatccctaccaaatgaaatgtcacaaaacgacgggtttgtaattattagaggctctcaaattttaagtggggtgatggacaagtctgttctaggtgatggtaagaagcattctgtgttttatacgatattaagagattacggcccacaagaagccgctaatgctatgaatagaatggcaaaactatgtgctaggttcttaggtaatagagggttttctattggtattaatgatgtcacacctgctgatgatttgaagcaaaagaaggaagaactagtcgaaattgcataccataagtgtgacgaattgatcacattattcaataaaggtgaattagaaacacaacctggttgcaatgaagaacaaacattggaagctaagattggtgggcttctatctaaagtcagagaagaagttggtgatgtttgtattaatgaattagataattggaatgcaccattaattatggctacttgtggttctaaaggttccacattaaatgtttcacagatggtggctgtcgttggtcaacaaattatttctggtaatcgtgttccggatggttttcaagatcgttcgttaccgcatttccccaagaattcgaaaacaccccaatccaaaggttttgtaagaaattctttcttttcaggcttatctcccccagaatttctgttccatgctatttcgggtcgtgaaggtttagttgacacagctgttaaaaccgcagagactggttacatgtctcgtagattaatgaagtctttagaagatctttcttgtcagtatgacaatacggtcagaacttcagccaacggtatcgtccaattcacatatggtggtgacgggttggatcctctggaaatggaaggtaatgcacaaccggtcaatttcaatagaagttgggaccatgcatacaatattacttttaataaccaagataagggcttactaccctatgcaattatggaaactgcaaacgaaatattaggaccattggaggaaaggttggtcagatatgataatagtggatgtttagtgaaaagggaagacttgaataaagcggaatatgtggatcagtatgatgccgagagagatttttaccattccttaagagaatatattaatggcaaagcaactgctttggctaatttaagaaagtccaggggaatgttaggcctattagaacctcctgcaaaagaattacaaggtattgatccagatgaaaccgttcctgataatgttaaaacatctgtaagccaactttatagaatcagtgaaaaatcggtgagaaagtttttagaaattgctcttttcaaatatcgtaaggcaagactggagccaggtactgctattggtgctattggtgctcaatccattggtgaaccaggtacacaaatgacattgaagacctttcattttgcaggtgtggcttccatgaatgttacattaggtgttcctcgtatcaaagaaattatcaatgcttccaaggtcatttctacacctattataaatgctgtattagtaaatgataacgatgaaagggctgctagggttgttaaaggtagagtggaaaagacactgctatctgacgtagctttctatgtccaagatgtttacaaagacaacttgtctttcattcaagtgcgtattgatttaggtacgattgataaactacaattggagttgaccatagaagatatcgcggttgctataaccagggcttctaaattgaaaatacaagcctctgatgtcaatattattggtaaagatcgaattgcaatcaacgtattcccagaagggtacaaagcaaaatcgatatctacatctgcgaaagaaccaagtgagaatgatgttttttaccgaatgcaacagttacgtcgtgcgcttcctgatgttgttgttaaaggtttacctgatatttctcgtgcggttattaatattcgcgatgacggcaagagggaattattggttgaaggttacggcctgcgagatgtgatgtgtacagatggtgtcattggttctagaactacaactaaccatgttttagaagtcttttccgttttgggtatcgaagctgcaagatatagcattattagagaaattaactataccatgagtaatcacggtatgagtgtcgatccacgtcatatccaactattaggtgatgtgatgacatataagggtgaagtgttgggtattacaagatttggtttgagtaaaatgagggactctgttttgcagctagcctccttcgaaaagacaactgaccatttattcgatgcggccttttatatgaaaaaggacgctgttgaaggtgtttctgaatgtattattttgggtcaaacgatgtcgatcggtaccggttcctttaaagttgttaaaggtactaatatatctgaaaaggatctggttcctaagcgatgtctatttgaaagtctctcaaatgaggcagctttaaaagcgaactaaagtagtcgtttttaaacttttttatagcatttgtattatttttctaccacagtcatttaacgtatttatacatataaaactacatgataaaaaccatg

SEQ ID NO: 2772 - DNA, 937 bp, Saccharomyces cerevisiae
catgccataaaagaaaacatacaccggttataaagttggaagataaacaattatgtcctctacacatagtaataatgtaggacatccccaatcttctccacaaggtccactaacggaacaacaaagagcacaacagcaatatcaaatttttgagaattcattaccaaaagtaagtcaatctgtgtatcagatgctgttgaacgagatggttcctctagctatgggcattgagaggcaaatatcaggcgatgttatcagttctgatagcaatgtaacttccgaaaatggtaacatcaacaatatgataaagagactgaagatagaggaacatcatacagtagatatcatacgttctcataacttgatacatgagctgtataaggcggatgaagaggaaaaagaaaaggttttagcaagactgaggaatattgggtttcaaatcggattgaagctgtcagagttattgatattttctaacaacccaaatttaaaattcaaggaaatggaccttctattaataatgaagttcatttgtagggatgtctggaaacaaatatttggtaaacagatcgataatttaaaaacaaaccacagaggaaccttttaccttcttgattatgactatcgacctattcaatcattttctttggaggaagatgcaaaaaacgaggagttaaaaatgatagaaccgtttttggagatacctgtgggaattattagaggcgtgttgtcttccttaggttattcatctgaagaggtcatttgcttggcgtcttttatcgacaggccaacagataggcctaaaacagcttttcccaagggagttagcttccatgttcaagtcacaatgccgcagtaaaggtccgacagatttttgttctaagaatgtacatcgacatatagatagatataagtgtgtatataaaagaacaggtga

SEQ ID NO: 2773 - DNA, 503 bp, Saccharomyces cerevisiae
ctatcacacaacaaaaagaattgtaacgaggaatacatgactaatatggcaaaagcaccaaaggcaaacacaccaaaagtaaccagcacgtcatctgcagtcttaacagattttcaagaaactttcaagacttctaagagggcatattttgcccaaattgaaaaatatcctaaactgaaactaattgatacattctgcttctttttggtattattaggggtgatccagtgtacattcattatcttgatccgtgataattttccattcaatgcgtttttagcgggattcattatttgtgtgggacaattcgtcctattgatgagtttgcggttacaattgtgtaatagttttccaggcatttctaaaaacagagcttttgccgagtttattgttgctagtttgattttacatttcgtttgtttacattttataaattgaggaagggtttgccggcgtgcttgcatgcatgcttgtatgtgtatagtatatatactttgtacgag

SEQ ID NO: 2774 - DNA, 3362 bp, Saccharomyces cerevisiae
ttagcctcgaaagggttatagggacagagagtgagcgacaatttttagtcattcatgtcttcaaacacttcttctgtgatgtcttctccacgtgtcgaaaagagatcgttttcttccactttaaaatcattcttcacaaaccccaataaaaaacggccatcgagcaagaaagttttcagttcaaacctctcatacgcgaatcatttggaggaatcagatgttgaagacacactgcatgttaataagagaaagagggtgtccggtacatcacagcatagcgacagcttaactcagaacaacaataatgcgccaattataatatatggaaccgaaaacactgagagaccgccgcttttgccaattttgcccattcaaagactgaggttattaagggagaagcagagggtgagaaatatgcgtgagcttggattaattcaatcaactgaatttccatctattacatcgtcggttatattgggctctcaaagtaaaagcgatgagggaggatcgtacctatgcacatcatctactccttcccctattaaaaacggttcttgcactaggcagttggccggaaaaagcggtgaagacaccaatgttggactacccattctcaaatcattgaaaaatagatccaatagaaaaaggtttcatagtcagtcaaaggggaccgtgtggtcagcaaattttgaatatgatttgtcagaatatgacgctatacaaaaaaaggataacaaggataaggaaggtaacgctggcggtgatcagaagacaagcgagaatagaaataatattaagagtagtatttcaaatggcaatctggctacaggccctaacctgacaagcgaaattgaagacctacgtgcagacatcaactctaataggttatcgaatcctcaaaaaaatctacttttaaaaggaccagcttccacagttgcaaaaactgcccctattcaggagagctttgttcccaattcagagcgctctggtacgcctacgttaaagaaaaatattgagcccaaaaaggacaaagaaagtattgttttgcccaccgtaggttttgactttatcaaggacaatgagactccatctaagaaaacttctcctaaggcaacttcttctgcaggtgcagtctttaaatcgagtgtagaaatgggaaaaaccgataagtcaacgaaaactgccgaggcgcctaccttatcattcaattttagccaaaaggctaataaaactaaggctgtcgacaatactgtcccttccacaactttattcaattttggtggtaaatcagataccgttacttctgccagtcaaccttttaaatttggaaagacatccgaaaaaagtgaaaatcatacagaatcagacgcgcctccaaaatcaactgctccaatattttcttttggtaaacaagaagagaatggtgatgaaggtgatgatgaaaatgagcccaaaagaaaaaggcgtttacctgttagcgaggatacaaacaccaagcctttattcgatttcggcaagaccggtgatcaaaaggagaccaaaaagggagagtcagaaaaggacgcatcagggaaaccaagctttgtctttggtgcaagtgataagcaagctgaaggtacaccattatttacattcggaaaaaaagctgatgtaacaagcaatattgactcctctgcacaatttacctttggtaaagccgccaccgcgaaagaaacacacaccaaaccatctgagacacctgccacaatagtcaagaagcctacttttacttttgggcagtcaacaagtgaaaataagatctctgagggaagtgcgaaacctacattctctttctctaagtcagaggaggaacgtaagagtagtccaatttcaaacgaagcagctaaaccctcgttttcgtttccgggcaagcctgttgatgttcaagcaccgacggatgataagactctcaagccaactttttcttttactgaacctgctcaaaaagattcatctgttgtttcggaacctaaaaagccctcctttacgtttgcgtcttcaaaaacctcacaaccaaagccattgttttcatttggtaagtcagatgcagctaaagaaccaccaggctctaacacctcattttctttcactaaacctcctgctaatgagacagataaaagacctacaccgccatctttcacctttggcggttccacaacaaataatacaacaaccactagcacaaaaccatcttttagttttggggctcccgagtcgatgaagtcgacagcaagtacagcggcagcaaatacggagaagctatcaaatggcttttcctttacaaagttcaatcacaataaagaaaagtcaaactctccaacttctttcttcgatggttctgcttcctcaacgccgattcctgtcttgggtaagccaacagacgctactggtaatacaacatctaaatctgcattttcattcggtactgctaacaccaatggtaccaatgcctcagcaaactccacatcattctcgtttaacgcccctgctactggtaacggcacaactactacttccaatacctcaggaaccaatatagcgggtacatttaacgtaggaaaaccggatcaaagtatcgctagtggcaatacgaatggagcgggctcggcatttggcttttcgagctcaggaacagcagcaactggtgcagcttctaatcaatcttcatttaattttggaaacaatggtgcagggggtctcaatccttttacatcagcaacttcgtcaactaatgctaatgctggtttattcaataaacctccttccacgaatgcacaaaatgtcaatgttccctctgcttttaattttacgggaaataattcaacgcctggtggcggctctgtatttaatatgaacggcaacactaatgctaatacggtgtttgccggctctaataaccaaccacatcaatcgcaaaccccatctttcaatacaaacagctcattcacgccatcaacagttcctaatattaattttagcggattgaatggcggaattactaataccgcgaccaatgcattaaggccaagtgatatatttggtgcgaatgctgcctctggttccaattcaaacgtaacaaatccatcatccatttttgggggggcaggtggtgtgccgacaacttcttttgggcagccgcagtcagcccctaatcagatggggatgggaacaaataatggcatgagcatgggcggtggtgttatggcgaacagaaagattgcaagaatgaggcactctaaaaggtaaatatcggttatgtaattaggtattgtgttgcttttctgaaggatatatattcctatattccttcaacttatacactg

SEQ ID NO: 2775 - DNA, 995 bp, Saccharomyces cerevisiae
ttacataaacttggttaccgcatactgcaacctcatataaatacaacataggaaagaaatggctgccggtgtcccaaaaattgatgcgttagaatctttgggcaatcctttggaggatgccaagagagctgcagcatacagagcagttgatgaaaatttaaaatttgatgatcacaaaattattggaattggtagtggtagcacagtggtttatgttgccgaaagaattggacaatatttgcatgaccctaaattttatgaagtagcgtctaaattcatttgcattccaacaggattccaatcaagaaacttgattttggataacaagttgcaattaggctccattgaacagtatcctcgcattgatatagcgtttgacggtgctgatgaagtggatgagaatttacaattaattaaaggtggtggtgcttgtctatttcaagaaaaattggttagtactagtgctaaaaccttcattgtcgttgctgattcaagaaaaaagtcaccaaaacatttaggtaagaactggaggcaaggtgttcccattgaaattgtaccttcctcatacgtgagggtcaagaatgatctattagaacaattgcatgctgaaaaagttgacatcagacaaggaggttctgctaaagcaggtcctgttgtaactgacaataataacttcattatcgatgcggatttcggtgaaatttccgatccaagaaaattgcatagagaaatcaaactgttagtgggcgtggtggaaacaggtttattcatcgacaacgcttcaaaagcctacttcggtaattctgacggtagtgttgaagttaccgaaaagtgagcagatcaaaggcaaagacagaaaccgtagtaaaggttgacttttcacaacagtgtctccattttttatattgtattattaaagctatttagttatttggatactgttttttttccagaagttttctttttagtaaagtacaatccagtaaaaatgaagg

SEQ ID NO: 2776 - DNA, 2006 bp, Saccharomyces cerevisiae
attcacttctttctacacaagatacaaaaaagaaaaaaggatcgattggagggtaaacgaaatcgtgtgataggcaggaaaagaaacatctattgctactttaattgaatttgtgctctactgaaatttttcaacagaagaagtgcttttacttctctcaatctctccatgtctcccttaactagaaccgtagctataaagaaaacggttaaggttctatctaaatgtcaatctggtagagaatacacacagaagtttctccaacgtgcatattcaacatcacatgccaacagcacatactattcaaggacaaagctattcatatcatcacattctaaagctctaaacattgctctactaagcgggtccctactgttgacctactcctactattcccctaaaaagatcctctcccttgatacaattaacggaataaaagattattctacaaatactagtggtaacattaacatgccgtcacctaatccaaaaggaacagagacacaaaagagtcaacggtctcagaatgaccaatctgttcttatcttgaacgattctaaaatagaggctaaactacatgatagagaggaaagccattttgttaaccgtggcactggtatattcaggtatgatgtggcacagttgccctctaaccatccaatagaagacgatcacgtagaacaaatcattaccattccgatagaaagtgaggatggcaagtccatagagaaggatttgtatttttttggaatttttgatggacatggtggtcctttcacttcggaaaaattatctaaagatctagtccgttatgtagcgtatcaattaggtcaggtatatgaccagaacaaaacggttttccattccgaccccaaccaattaatcgattctgcaatttcgaaaggttttttgaaactagataatgatcttgtaatcgaatcgttcaggaagctgtttcaagatccaaacaacacaaatattgcaaacactttaccagcgatttctggttcttgtgcactattaagtttatacaactccactaactcaattttgaaagtggctgtcactggagactcaagggctttaatttgtggtttggacaacgagggcaattggacggtaaagtcgctatccaccgaccagaccggtgataatttggatgaagtacggagaattaggaaagaacatccaggagaaccaaacgttataagaaacggaagaatattgggttcattacaaccatccagggcatttggagactatcgctacaagatcaaagaagtcgatggaaaaccattatcggatttgcctgaagttgccaaactttattttagaagagagccaagggatttcaagacacccccatatgtcactgcggaaccagtgattacttctgccaaaattggtgagaacactaaatttatggtgatgggttcggatggtttattcgaattactaactaatgaagaaattgcttccttggttatcaggtggatggataaaaatatgaatctggcacctgtgaaggcagaaccggggaaattaccaaaagttatcgatgtatctgaagacaaggaagcacaaagaccggcattcaggtacaaggataataattcgagctcaccatcaggatcaaacccagagtatcttattgaagacaaaaacgtcgccactcatttaattagaaatgcattaagtgcgggcggaagaaaagaatatgtatcggcattggtaagtataccatcgccgatgagtagaagatacagagatgacttgacagtaacagtggcgttctttggtgattctggaacaccctcaattgtctccaatgctacttcaatagttatgaacccggaggcaacaacaaagccaaaacctagattatgacgatataaacttatgctgaggtaggtatataccagaggatttattttatagatattagtctgctgattatctagtttcttgtcacctcatacgtgttttttttttttttggttttctcg

SEQ ID NO: 2777 - DNA, 699 bp, Saccharomyces cerevisiae
cttatctaagctataaaaaaatatcccttttatcacacaaaaaaatgaacacatcagtcacttccataaagttggtactgttgggtgaggcagcagttggtaaatcgtcaatagtcctaaggtttgtatctaatgattttgccgaaaataaggagcccaccattggtgcagcattcctcactcaaagagttactataaatgaacatactgttaagtttgaaatatgggacactgctgggcaagagagatttgcatctttagcacctatgtactatagaaacgcacaagctgctcttgtagtatacgacgttacaaaaccacaatcctttattaaagcgcgccactgggttaaggaattacatgaacaggcatcaaaggatatcatcattgcgttagttggtaacaagatcgatatgctgcaagaaggtggggaaagaaaagtcgcaagggaagaaggtgaaaagctagcggaagaaaagggcttgttgttctttgaaacaagtgcaaagacaggagagaatgttaacgatgtatttttgggaatcggtgaaaagataccactgaagacggctgaagagcaaaatagtgcaagtaacgaacgtgagtcgaacaatcaaagagtggatttgaacgctgctaatgatgggaccagcgcaaacagtgcttgcagttgttagagaggggaaaataaatatatat

SEQ ID NO: 2778 - DNA, 3858 bp, Saccharomyces cerevisiae
aactaatagcattggctactccaatttggacttactggctggtaattgacttgtatagcattgtcttagcttattattttttttttgctgaagaataagtaggataattgaagaagaatagctaagataaaaaaagatagctagtgcattctgaaaacttcaattgcgtggtacatacaatatggccaaagaagatactggggtaacagcaccaaagaagcccgaaacagcccaagtagctaacataaatgggatagataagttagaacctccaaagacgaaagaggaaaccgaatccagtaaaagcgtgtcatctgagaaggcggcacatgctagtgatgaaagcttcaagagaagtatccatgaagcttcttatgtcggctggaaacagattggtggctgggaagacaaagacgaattaactttagatgatgaattgatggatatgactagagaaaccttcttagataacatcataccggacagcctttacggtgactggtatcattcggtagccattttctttatcggaggcgtggcatcatttgcacttggtcattataagttttcaatggggtcggccttttttgtcatcgttatcacttcattgttgtatagaacctctgctaaaaaatacagaggttccataagagagttagtccagaaagagttcacggtgcagaaagtggaaaacgactatgaatccctagaatggttgaatgcctttttggataagtactggcccattttagaaccttccgttagtcaattaatcgttcagcaagctaatgaacaaatggctactaatgaggcgattcccaaatttattactcaactatggatcgatgagttgacacttggtgttaaaccccccagagttgatttggtgaagactttccaaaacactgcatccgatgttgttgtgatggactggggtatttcttttactcctcacgatttatgcgacatgagtgctaagcaagtcagaaattacgttaatgaattagcggttgttaaggccaaaatttttggtatcaccatccctgtttctgtgtcagacattgctttcaaggctcatgctagagtgaaattcaaattgatgactcccttccctcatgtcgaaactgttaatatccagctactgaaggttcctgattttgattttgttgctaccttattcggccgttccatcttcaattgggaaattttagctatcccaggccttatgacactaatacaaaagatggccaagaaatatatgggtccaatcttgttacctccattttctttacaattgaacattccacaactcttatctggttccaacttgtccattggtatattagaaataactgtcaaaaatgcaaaggggctaaaacgtacctcttcgatattgaacgaatcaatcgacccttacttatctttcgaatttaacgatatatctattgccaagacaagaaccgtaagagacacattgaaccccgtttgggacgaaactctgtacgtcttgttaaactcattcactgaccccttgaccattagtgtttatgataagcgtgcaaaattgaaggataaagtcctaggcagaattcagtacaacttgaatactttacatgataaaaccacgcaaagaaacttgaaagctcagtttttaagaaactctaaaccggttggggaattgacttttgatttaagattcttcccaactttagaagagaaaaagttgccggatggatctgtggaggaactaccggatttgaatactggtattgctaaagttgtggtcgaagaaggttctcgttttgctgaagaagaacagaaggttactgcctacgttgaagtttacttgaatgctaaactagtgttaaccactggtaaggcaactgacactggtacattgaagtggaattcagactacgaagcagttattgcagatcgtcgtaaaacaagatataagtttgtcgtcaaggatggcaaaggagaagaaattggatctaccattcaaaccctgaatgatttaatagatagaagccaagtgaacaaaaatttgattccattaaaaaaccaaaagggtgacataaagattaccacatattggagacctgttagactggagattggttccaactctgtagcttacacgccaccaattggcgccatcagagtattcattgagaaggcaaacgatttgagaaatttggaaaagtttggtaccattgatccatactgtaaagttttggttaatggtttatcgaagggtagaactgatttcaagagccaaactttgaatcctgtctggaatcaagttatttatgttgcagttacttcaccaaaccaaagaattacgcttcaatgtatggatgtcgaaacagtcaacaaagatcgttcacttggtgaattcaatgttaacgttcaagatttatttaagaaggatgagaatgataaatatgaggaaactattgatgaaaaagctaaagttggtcgtctagtgatgcctaagaaaaaacctaagggcactataacatactatacctccttttatcccgctttacctgttttaacgttagaggaaatccaagatttagataaagttaacaaaaagaaaaaagcattggaactgcgtaagtcagcaattgatgagaaaaaaatttctaaagaagacaaagccaaatttgatcaagaatggaatgaggtcaaagaattggaagacatgtatagtaatagacagaaattggatttgccagaattattgcaatacaaccaaggtgttcttgctgtcactgtccttaatggggaattgcccgactctgggctatacgtccaagcgtttttcgatgataatggtcatccaagatttgttagtccacgtattccatcgagaattgtcaagaatggttggtcaggtgacgtgatcataaaagaattggacaaatccattaccacttttagagttgctaaaaataaaaactacaacagagtggagaaatgcgtttgtgaagtagaactacccacacaagagttagttaagaactgttattataagccatcaatattacatctttcaggtgaaggcagtgctaaactaatgctccaaatatcatggttccctattgatacaaaacagttgccggcaaatgacctgatcacaaattctggtgatttgacgattatgtcgaggagtgcagaaaacttgatagcatccgatttaaatggttattcggacccatacttaaagtattacatcaataatgaggaagactgcgcttacaagacgaaggttgttaagaaaactttgaatcctaaatggaatgatgaaggaactattcaaatcaataaccgtttaaatgatgttctaagaatcaaagtcatggactgggattccacatctgcggatgataccattggtacagcagaaatcccattgaataaggtcaaagtcgagggtactaccgaattagacgtaccggtagaaggattagagaacgctggtcaagacggtggtatgttgcatttagctttcagctttaagccaagatacaccattagcgtgagtaaaagagaaaagaaggtcggagatatagcatccaagggactaggtactggtttgaaagctggtacgaccgtgataggcggcggtgttggtgccattggcaagatcaagaaaggggtattcggtggactaggcagcctcacaaaccataagaagaatcatgagatgggcgaagaagaaactaagttttagcgagaaagagagggacaagatgcactgtgtaaaatataaatttcgttttattttcttttatattttttaaaaatctttatctagtataactttccatctctttgttatggtgaaaa

SEQ ID NO: 2779 - DNA, 2362 bp, Saccharomyces cerevisiae
aagacatcataaacagcacaaggaagacggttctgtttcgttgctatgtctaataccttgccagtaacagaatttcttttatccaaatactacgaactttccaacactcctgccacagactcatcatcgctcttcaaatggttataccacaagactctctcccgtaaacagctgctcatatccgatttgtcttcccagaaaaaacacgccatctcctacgatcaatggaatgacatagcgtcgcgattagacgacttaacgggactttccgaatggaaaacaatcgacgagtcctcgttgtataactataagctgctgcaagacttgaccatccgtatgcgccatttgagaaccactcacgactaccaccgcctgctttatctgattagaactaagtgggtccgtaatcttggcaacatgaataacgttaatctttacaggcactcgcataccggcacaaaacaaattatacatgactacctagaagagtctcaagcagtgctcaccgcgctgatccatcagtcaaatatgaacgatcactatctcctcggtattttgcaacagacgagaagaaacatagggcgcacggctctcgtgcttagcggtgggagcactttcggccttttccacattggtgttcttgccgccctttttgaatcggacctgatgcctaaggtgatcagcggtagcagtgctggcgccattgttgccagcatattttgcgtccacacgacccaggaaattccctccttgttgaccaatgtacttaatatggagtttaacatcttcaatgacgacaattccaaatctcccaacgaaaacttactaatcaagatatcgaggttctgccaaaacggtacctggttcaataatcaacctttgattaacacaatgctttcgtttttaggaaacttgacctttagggaagcctacaacaagactggaaaaatcctgaatatcacagtctcgcctgcttccatatacgaacagccgaaactactaaacaatttaaccgctccaaacgttctcatctggtctgccgtatgcgcatcttgttctctacctggagttttcccctccacgccgctattcgagaaagatcctcacactggaaagattaaagagtggggggcaacaaatttacatttatcaaacatgaaattcatggacggatctgtagataatgacatgcccatttctcgtctttctgaaatgttcaatgtcgaccacattatcgcctgccaggtaaatatacatgtctttcccctgttaaagttttcaaacacttgcgttgggggtgaaattgaaaaggaaattaccgcccgtttcagaaaccaagtaacaaagatcttcaaatttttttccgacgaaactattcattttttagacatcctaaaggagcttgagttccatccctatttgatgaccaaattgaaacacctttttttacaacaatactctggcaatgtcacaattttacccgatctatcaatggttggtcaattccacgaagtattgaagaacccatctcaacttttcctattgcaccaaactactttaggtgcaagagctacttggccgaaaatttccatgattcaaaataactgtggccaagaattcgccttggataaggccatcacattcctaaaggagaaaataataatctcttcgtcaataaaaaaccctttacaattctaccaacctcgattcagtgagcaaatcaaatctctttccataatggatgctgacttgccgggagttgacttggaagaatcctcctccaattcactatcaattatcaagtctcccaacaaaacagcggcaccgggaagatttcctcttcagccattgccttctccatcttctaccttcaacaagaggaaaatggatatgttatcgccttctccatcgccttctacatctccacaacgttcaaaatcttcattcacgcagcagggtacaaggcagaaggcaaattctttatcgtttgccatcggtgcatctagtttacggctaaagaaatcaccattgaaggttccatcacgacctcaattcaaaaaaagatcttcttattataatcaaaatatgtcggcagagatgaggaaaaatagaaaaaaatctggaacaatttcctcttatgatgttcaaacaaactcagaagattttcccataccggctattgaaaacggttcatttgataacactttattcaatccaagcaggttccccatggacgctatgtcggctgccacaaacgacaatttcatgaacaattcagacatttttcaaaattgaaatgaaagacaataagtacatttttatataaaaagctttctatattctcacctccatcaactccaaa

SEQ ID NO: 2780 - DNA, 1107 bp, Saccharomyces cerevisiae
gctgcataaaaacttctcaaataagcgcggtttaaagctagtgttaccaagaccgataataatgaagtttttgggtgtaatactgctagcaagttttcttttgattgctaccttcctcatagggcttatcccattgtattatattgataaacaaaaaagttccattgtcacaaaccaagaaggtgctgactcaatttctgattttactacgaacgcagatactcaaacgatcaatgacgatgttagtagttaccgtgtgaagattgccgttctatcacaattcggtataggaatgttgttaggtacatcatttatgttggtaataccggaaggtatcaaagcgtgtgtcgaacatgatggaaacgttggtgtgaatttattaattgggtttctaggtgtttatgttcttgataggttggttacactatgggtttctagaaagcaaacggtctatacgcatgatgctgtcaaatttcaaagctggaaagatataataaaccatccaagacaaatatggatgaacttaatacaaaacaatgttgtctttgccttattcattcatggactatctgatggaattgcattaggtacgacaacgaacaatgattcactgctcatagtggtgttaattgctatagttattcataaaattcctgccgttctttccctcactagtttgatggtatcgagacaaaacttaatgaaatgggaggtgatctgtaacgttttcttgtttgcgtcatcgactccgatcggatacatagtgttatcccttttgaatctgagtcattcgccaacgatggattggataagtggaaatcttctgcttatgagtggtggcagtttactatatgcgtctttcacagcatttgttggtggagattctcatgatcacgatctcagcgttgaacaggaagtcgttttacctcatgatgaatccgtttatgttttgataggtgtctgcataccgttggtgatatcgtactgcatctctgaagaataacctaccaaacttcagtatatattctcattgtttgattatagataaatgaacattatgattaattttgtgattgtactattattttattatgttgtatgctatat

SEQ ID NO: 2781 - DNA, 1797 bp, Saccharomyces cerevisiae
atgagcttcagtagtatagtctctaagtttttgagatatttagaaattcctgccaaaaataggactgccgtgaattttctgaggaaccctgatttgcaacctatcaagtctgcaaatcaaacatgggggttctggtctaatttggcgtactggggcgctgtgtcctttacagcaggtacatggatgagtggttctgctgcactaagtgtcggcctaagttacccagagaccattgtttcgtttcttctcggtaatgtcttgaccattattttcactatggccaactcttaccccggttatgattggaaaatcggtttcaccttggcccaaagattcgtttttggcatttacggttcagccttcggtatcatcattagaattttgatgagtattgtcaattatggttccaacgcttggttgggtggtctatctatcaacatgatattagattcctggtcccaccactatctgcacctgcccaatactttgtccccaagtgttgccatgaccaccaagcagttggtcggcttcattattttccacgtcctcaccgcgctctgctatttcatgaaaccctaccatatgaactaccttttaatttggtcatgtgtagctacttgctttgccatgctgggtatagtgatttacttgactaagaatgcccatggtgtcggtgaattgtttacctccacaaaatctaccgttactggttctaaaagagcatgggcttgggtttacatgatttcatactggttcggttccatttctccaggttccaccaaccaaagtgactattcaagattcggttcctccaatttggctatctggaccggtagcgtctgtgcattactaatcccagcaaccttggtcccaatcttcggtgtcattagtgcctccacctgcgacaaattatacggtaaacaattttggatgcccatggatatattcgattattggttgacaaacaactattctgcaggcgctcgcgcaggtgccttcttctgtggtctttgctttaccatgtctcaaatgtcctccaccatctccaactgtgggtttgccactggtatggatatggccggtttgttgcccaaatacgtcgatatcaagagaggtgctcttttttgcgcatgtatctcctgggcttgtttgccatggaacttctacaactcttcttctactttcttaactgtcatgagttctttcggtgttgtcatgactcctattattgctgtcatgatctgtgataactttctgatcaggaagaggcaatattccattactaatgcctttattctaaagggtgaatactattttaccaagggtgtcaactggagagctatcgttgcctgggtgtgtggtatggctcccggtctacctggtatcgcttgggaagtcaacaataactatttccacgactcaggtattgttaaattcttttatggtgattctttcttctcctttttgatttcttttttcgtttactgggggctatgtgtcttcttcccattcaaaattactgttagacatgatgacaaagattactatggtgcatttaccgacgaagaagcgagaaagaagggcatgattccatacagtgaaatttctgaggaagaaatccgtgcttacacgttaggcgaatgctacacaactggacacgaatacaaacctgagagttctgataacgaatcacctgaattgatcaaaactagctcagaaaacactaacgtatttgaaatcgttcaccaaaaggatgatgaaaagcactcctttagtaccactcaacaagttgtctga

SEQ ID NO: 2782 - DNA, 1807 bp, Saccharomyces cerevisiae
cagcaaggcatttgacgtctattggatagcctacgatgaaaggtgatcgttcgaggcaaaatatggctgtgacaaagaaggcaaagttaaaaaaaaatgacgagccaaaaaaggttttgaagactgccgcgaccgaaaaaggtgagggatccaagcgctactccttatggaatttctggataagcacattgtttttaaaattactattgattcctgactacttcagtacagattttgacgttcatagaaattggctggcaatcaccaataaattgcccatcagcgaatggtattatgagcacactagtcaatggacattggattatccgccattttttgcttattttgaatggtttttatcgcaatttgttcctaaatctgtacgtgatgacggttgtttggatatagtggagatcggaaagttcggtttgccaacaatcgttttccaacgactcactgtcatcttcagcgaaattcttctatttgtcatccttcaaatatacattaatactacaaagctaagtgaaagatctcaaagttttgtggttgcttctagcattgtactatcacccgggtttttaataatagatcacattcacttccaatataatggttttctttttgcgattctaataggctccattgtcgccgccaagaataagagatacatcttgtgcgctgttctgtatactacagccatatgtttcaagcatatatttttatatttggcgccatgttatttcgtgtttttattgagagcatacgttctcaatgtcaacaatttcaagtttaaaagttacaaagattttttgttcctgataagatgggcaaatcttttgaagttggctaccgttgttgttggaattttcactatttgtttccttccatttgctcatcaaatgccgcaagtgttgagcaggttattcccattctcaagaggactgacgcatgcatattgggcaccaaatttctgggcgttgtattcttttatggataaaatactcactacggtaatgttgaaattaccgtacgtccacacttttgctacaaaatttattaaacctcctctgatccctcagaatatcaaggaaattaatgaaaggctcgcggcaaacaacaatggaagtaaaggtctagttcaagacgtattttttgttattctccctcaaattcctccaaaattaacgtttattttgacgatattttaccaggtcttagcagtacttccacttttgtttgatccatcgttcaaaagatttgttggctcgttgactctctgtgggttggcatcgtttttgttcgggtggcatgtgcatgagaaagctataatgctagtcatcattccgttcacatttcttgttggatttgatcgtcgtcttttggtaccgtttatgttagttgcctcagctggttatgtttccttgtatcctcttctgtacaaaggccaagattttttcattaaaacattatacacttatgtttggtgtataatttattttgccgcttttagaaaaactacgaagatttcttcaagtgtagaaagaagaatctttttcttggataggttggcattaacgtacatcttttcattgttaccaatcgtcaccgtattacaaatattggatgaagtcaagtggagatattcatttttgcaaaaatttgaattcttaggattaatgatatatagtgtctattgttcattaggtataatcagctcgtggtttgccttatcgtggttatataattttgacgaattactatggcagtgatacaatatcgcttccctaggacgttaaaaaaaaagtga

SEQ ID NO: 2783 - DNA, 1442 bp, Saccharomyces cerevisiae
ctcatcggcgatcatagttcagtatttttctaaagtttctttaaaggagcataatatgaccgaaaaccaaaccgcacatgtaagggcgttgatattggatgccaccccattaattacgcagtcctacacacattaccagaattatgcacagtctttttatactactcccacagtttttcaagaaattaaggatgctcaagcaaggaaaaaccttgaaatttggcagagcctcggaactttgaaattagtacatccaagtgaaaactcgatagccaaagtaagtacgttcgccaaattgaccggtgactactccgtactgagtgccaatgatttgcatattcttgctttgacatacgagttagaaattaaactaaataatggcgattggagactgaggaaaaaaccaggtgatgcattagatgcgtccaaggctgacgttggtacggacggcaaacagaagctcacagaagataataaaaaggaggaggactctgaaagtgttccaaaaaaaaagaacaagagaagaggtggaaaaaagcaaaaggcaaaaagagaagcaagagaagcaagagaagctgaaaatgcaaaccttgagctagagagtaaagctgaggaacatgttgaggaggctggatccaaagagcagatatgtaatgatgaaaatataaaggaatcttccgatttaaatgaagtattcgaggatgctgatgatgatggtgattggattacccccgagaacttaacagaagcaattattaaggatagtggtgaagataccactggttcattgggtgtagaagcgtccgaagaggatcgccatgtcgcattgaatcgaccagagaatcaggtggcattggcgactggcgattttgccgtccaaaatgtagcgttgcagatgaatctaaatctaatgaatttcatgtcaggtctgaaaatcaagcgaatccgtaattatatgctaagatgccacgcctgtttcaaaatatttcctctaccaaaagacggcaagccaaagcacttctgtgcctcatgcggtggacagggtaccttattaagatgcgcagtttccgttgactcacgcacggggaacgttacaccgcacttgaagtcgaacttccaatggaacaatagaggaaacagatattctgtagccagccccttatctaagaactcccaaaaaaggtacggcaaaaagggacacgtacattctaaaccacaggaaaatgtgattctcagagaagatcaaaaggagtacgaaaaggtgataaagcaagaagaatggacaagaagacacaacgagaagattctaaacaattggattggtggcggttctgcggataactatatttctccatttgcaattactgggttgaagcagcataacgtccgcattggtaagggaaggtacgtcaacagttccaaaaggagaagttagtgttttt

SEQ ID NO: 2784 - DNA, 814 bp, Saccharomyces cerevisiae
tcaagcagcctatccgctaaaccgctatttattctgctttactgattcatttacatcaagtgaagcacaaaactatcaaaatcaccaaaagaatagaaactaaaaatgtctgatataaacgaaatcgaaattccatccagaaaggatgaaattagacaagttactcccaaggatcccatgcatgagatcgaggataaaagcacataccacgctaagataaagaaatcagattccgggaccgtcctgggtgctataccgttgaattcaaggtcttctagtaactctagcgtgacatcgacgggtcagagcagtaggcgggtgactaagaaaacgaccaagaagaaaaagaagaatgcttgttatttcgatacctgttcaagtgcggcttcgaaattcatcggtgactgtaatttttgcaaaggtcacttttgctcgaaacacagattaatggaaaaccatgcttgtaatggcttaacgagctgcaaagaacagctacatcaaagaaacgctgataagctagaagctgaacaaactaaggctccaaagatacaaatttaaacacctatcatggttaaatcatacacacatctaattcactgggaactgcattgtaacgtctaatcggcattgatgttacacaagggaaaagaacgcttttgatgcatttctctacaaaataacatgtataaattacttgaatggtctcttcgttttttttttttttttcttcatctatcctgactcatcaagagagaccgttcattgtaaccacttactcttatataacgtataactaataatattaataatcaag

SEQ ID NO: 2785 - DNA, 1437 bp, Saccharomyces cerevisiae
aaaaagaattgaagaaaaaaggagaacagtccaagaaagtaatcgtacagaaatggctaaaagacccttaggtttaggtaaacaaagtagagaaaagaaaagaaaggtggaaagtgtcgaaaagaagagcgatgaaccttccagagaatccacacctgtgagaagtcaaatgagtgttgagcttgacgatgatgctgatttagatgacgaattagctcagctgaaaggactgtggtctaaatattttcactctgacagagacgacgaatatgttttaaatggaatcgttcacgaatgtgacagattattgcgtctttctgaagaagataaagagattaagaagacgctgaacgatattttccatggtatatatgctctggctttatctgaattgactattttcaaggcaggcgatgaggaagccactgaagaaaagagaaaaaaagatgtatcctcattttttgaaagtgctatcgaaagagtcgaattaggtctttcgcatttccctgaatcccaatttctaaaactagttttagcaaagataattttccaaaggattccgttggaatatatttccaatctccatttgaaatcgaaggataaaaaacttgatcttgtaggacagcttgaacatggtaagaagcatttttcaatttatgaaaacgatactgaatttacttttgaaatcctacaaatggtgaatgacttattggacatcgtcgagaattttggtcgcgaacaatctattcaagagggcatagatagcgataatgaagaggaagaggaactcattgatattgagttggaaccagaacaccctgtatatcccctacaacaatcgctagaagcgaattacgagtggctaagaaaccattttgataaattgcttgacaacacaaatacagatgtgaaaatctatgcatcaatagctaacaccctaggggaactatacctaaaaaaagctgaagaaccaagtaaagttttcttaagcctacagtacgatgatggcggttctgaaaaggttagcgacaaggaagccaagaacgcccaagaaaccgctttgaagcacacaaaaaaggctttagaatacttggaaaaggctaaactggaggatgatccggacacctgggttcaagtcgccgaagcatatattgacctaggtaacctgcttgacaatgaaagtgctgaacaagaagaagcttacaaaaccgccgaagaaatcttaggcaaagcaaacaaggcttctcatggtaaatttcaagatgtcctggacaatttcttacaaggctgagcgcatccacgcttcttttttatttttactcactccttctgttgccttaagtactctcaaaaattactatttttatctagttttatagaaaagctaaaagaaaggctatatttattagagcgcgtgttgaaatatagtcacaactt

SEQ ID NO: 2786 - DNA, 3121 bp, Saccharomyces cerevisiae
ggaagtgctacagccaagtttcgtaatataatgggtgttccgtcatttttcagatggctatctcgaaaatatccaaagatcatatccccagtattggaagagcaacctcagatagtcgacggtgtcatattgccgttggattattccgcctcaaatccaaacggtgagttagacaacttgtatttggatatgaatggtattgttcatccatgttcgcacccagaaaacaaaccgcctccagagactgaagatgaaatgcttttggcagtttttgaatataccaatcgtgtgttaaatatggctagaccacgcaaggtacttgttatggctgttgatggtgttgctcctcgtgccaaaatgaaccagcagagagcgcgtagatttaggagtgctagggatgctcagattgaaaacgaagccagggaagaaattatgagacagcgagaagaagttggtgagataatcgatgatgccgtcaggaacaagaaaacttgggattcaaatgcgatcactccaggcaccccatttatggataagcttgccgcggccctccgttattggacagcatttaaactggccactgaccctggttggaaaaacctgcaggtgattatcagtgacgccaccgtcccaggtgaaggtgagcacaaaataatgaatttcattaggtctcaaagagctgatcctgaatataatcccaacacaacgcactgtatatacggtttggatgctgatttaatttttttgggccttgccactcatgaaccacattttaaaattctaagagaagatgtttttgctcaagacaatcggaaaagaaataacttaaaagatactataaatatgactgaagaagaaaaacaatttctccaaaaacaaaattccgaacaacctttcttgtggctgcacataaatgttttgagggaatacttgtccgctgagttatgggttccgggtcttccatttacatttgatttagaaagggctatcgacgattgggttttcatgtgctttttctgtggtaatgactttttaccacatttaccatgcttagatgtcagagaaaatagtattgatattctcttggatatttggaaggtagtactaccgaaattgaaaacgtacatgacctgcgacggtgtcttgaacctcccttctgttgaaacgctattgcaacaccttggctcccgtgagggggatatcttcaaaactagacatattcaagaagccagaaagaaagaagcttttgaaagaaggaaagcgcagaaaaatatgtcaaaaggtcaagacaggcatcctacagtagctacggagcaactgcaaatgtatgacacacaaggaaatttagcaaaaggttcatggaacttgaccaccagtgatatggtaaggttgaaaaaggaactgatgcttgcgaacgaggggaacgaagaagcaatcgccaaagttaagcaacagagtgataagaacaatgaactgatgaaagatatcagcaaggaagaaattgatgatgctgttagtaaggctaacaaaactaattttaaccttgcagaagttatgaaacagaaaataataaataagaaacaccgtcttgaaaaggataatgaagaggaagaaattgctaaggatagcaaaaaagttaagacagagaaagcggaatcagagtgcgatctcgatgcagagatcaaagatgagattgtggctgacgtaaacgacagggaaaactctgaaactacagaagtatcaagagattcaccagtccacagcacagtgaatgtcagcgaaggtcccaaaaatggggtctttgatacagatgaatttgtcaaactattcgaacctggttaccacgaaagatattacacagctaaatttcacgttactcctcaagatattgaacagttaagaaaagatatggtaaaatgctatatcgaaggggtcgcctgggtactaatgtattactatcaaggttgtgcctcttggaattggttctatccgtaccattatgctcctctggcaacagatttccatgggttttctcacttggagataaagttcgaagaaggtactccatttttaccttacgaacaattgatgagtgttttaccagctgcatctggccatgctttgccaaaaattttccggtctttgatgtctgaacctgactctgaaatcattgatttttatcctgaagaatttcccatagatatgaatggtaagaagatgtcctggcaaggcatagcgttgctaccattcatcgatcaggatagactgttaacagctgttcgtgcacaatatcctttactttctgatgctgagagggcaagaaatattcgcggagaacctgttttattaataagtaacaagaatgctaattatgagaggttttcgaagaaattatactcaaaggaaaacaacaacaacaatgttgttgtgaagtttcaacacttcaagagtggtttaagtggtattgtatcaaaggacgttgaaggtttcgaattaaatgggaaaattgtatgtccgattcaaggtgggtcactgccaaatttatctaccaccttgattttaaagatgtcctatagattaattccgttgccatcgagaaataagtctattatactgaacgggttcattccgtcagaaccggtactaacagcatatgaccttgattccataatgtacaagtataataaccaaaattactcccgtcgctggaactttggtaatgatttgaagcaaaatattgttccagtaggaccaaagggtattactcagtacaaaccaagaactggtggctatcgagcattcttttattttgctgagctcagtagaaataatgtccaacccgcccacaactatggtaggaatagctacaacagtcaacccggcttcaacaatagcaggtatgatggtggaaacaataattacagacaaaattcaaattacaggaacaataactattccggaaatagaaatagtggacagtacagcggcaacagctactctcggaataacaagcaaagtcggtatgacaattcaagagcaaataggcgttagaactactcgtgcgcattttattttatggtaaatttaggttttcgcaaatttataaaatcttcatacaatt

SEQ ID NO: 2787 - DNA, 1534 bp, Saccharomyces cerevisiae
catctataaaaatacttaccaccttagatcggaatgagtgatacaaagagagatccggccgatttactagcttctttaaagattgataatgagaaagaggatacaagtgaagtttcaacaaaagagactgttaagtcccaaccagaaaagactgctgattcgatcaagcctgcagaaaaattagttccaaaagttgaggaaaaaaaaacaaaacaggaggatagtaatttaatcagctcagaatatgaagttaaggtcaaacttgctgatatccaggctgacccaaattctccattgtacagtgctaaatcttttgatgaattaggattagcaccagaactactaaaggggatatatgctatgaaatttcaaaaaccatccaaaattcaagaaagggcgctgccattattattacataatccgcctaggaacatgattgctcagtctcaatcaggtacaggtaaaactgccgccttttctttaacgatgctaacaagagtaaacccagaagacgcatctccacaggcaatttgcttagccccctccagagaactggccagacaaacactagaagtcgttcaggaaatgggtaagttcacaaaaataaccagtcagttaattgttcccgattcttttgagaaaaacaagcaaattaatgctcaagtgattgttggtacgccgggcactgttcttgacctaatgcgtagaaaattgatgcagctacagaaaattaaaatttttgttttggatgaagccgataacatgttggatcagcagggtctaggtgaccagtgtattcgtgttaagagatttttacccaaggatactcaacttgttttgtttagtgctacttttgccgatgcagttaggcagtacgcaaagaagatcgttccaaatgctaatactttagaattacaaacaaatgaagttaatgttgatgccatcaaacaactatacatggactgcaaaaacgaagcagataagtttgatgttttaactgagctatatggtttaatgacaattggatcttccattatttttgttgcaaccaaaaaaaccgcaaacgttttatatgggaaattgaaaagtgaaggtcatgaagtttctatcttgcatggtgatttacagacacaagaaagagacagattaatagacgacttcagagagggtagatccaaagttttgattactactaatgtcctggcccgtggtattgatattcctactgtctcaatggttgtcaactatgatcttccaacgcttgctaacggacaagcagatccagctacttacattcacagaatcggtagaaccggtagattcggcagaaaaggtgttgccatttcctttgtacatgacaaaaattctttcaatattttatctgcaattcagaaatacttcggtgatatagaaatgactcgtgttccaacggatgattgggatgaagtcgaaaaaatagttaagaaagtgttaaaggattagaattcagtacataatacctcaaaatacgtaaaagctttaatctaatttcata

SEQ ID NO: 2788 - DNA, 2351 bp, Saccharomyces cerevisiae
atgaccagtatgtcaattattgatgatgagaacgtgaaaaaaacttctaatggggcagctgttgtcactgatgtggctcaacacgctgtaagtgattcggacaataacaaagcgcaacttctaggcgatggatccaacactgaatatgtggttgatattttcattgaagccgctaaggatggggatttaaaagtggtgaaggacgtggtcgaaagtggagcagtggatattaataacgaccgcattgatgaattatccggcttacactgggcctgtataaacaataggttttctgtagcaaagttcctattacttaggggagcaaatcctaaccaggcggcaggccccggaggggctactgctttgcactgggccgcaaggtacggtaatatctacattgttgacctgcttctcaaacatggcgctgatccgacgctcaaagatgagcagggtcttaacatcatgcattttagcgtttacagttctaacattttacttgttgtttatgttctttattttgtcgtaaacaacaatgacaacgtcgatatcgattcaaaagataacaataacagaacacccctactttgggctgcttatcaaggagattttctcactgtagaacttttattgaaatttggctccacagttgcatggacggacaacagagggttcaatgctctccattgtgctctagttggaggtgatcaaagggtcatatgtgacttaatacttagcggtgcaaatttctacgaaaggaataaccagaagcaagactgttttgatctagccgaaggaatgggaaccaaatcactttttgaacaagcgttgcaacatcatggatatgacaggcttggaaatcagaaagacaaactgttcaagaaaagctcgcatgcacaattcacaatttttttgtcaccatttttactcatggtttacatatacttaatttctctcgttctttctccagtgctagccattatgctttccctactggtcactgttgtcatggtcaacacattaaagaagtttgtattaccatgccttcccagaaaaaacacttacaaagtttctttgactagaactccctttttcagtggcctctttctgtccactttctgttttttaatatatatatggacgaagaaactctatccatatagtgtatctgactataccatgaaaaacgtccagtttttggttacttcctttctcacagttgtactatttctgagattagtacggtcagatcctggttgtctgaaaacggatgatagtttgacttcgatacaagaaacaataaaacaactgattgacttagggaagtttgatagggaaaacttttgtgttgagacattagaaaggaagcctttgaggagtaaatattctttctttagcggcgccctggtggccagatatgaccattattgtccatggatttataatgatgttggcttaaaaaatcacaaactttttgtcttctttgctgtgacggtccaatatcacatgtttttgttcatgtggttatgtctggcatattttaagaaaacgaactatatttacgaacaagttgaagaatatgcaagatgtgccctgctcaagaatgagactttgtgtaagggttctaattacgatccctctaccttttttttattcatttggattagcgtaaacttcatctggctgggggctatgttgattgtccagttcttccagatattaaaaggaatcacgactcctgaattgttcatcttaatcaaggaggagcacaaggcaaaatttatcaatctgatacccttcgaaaactctatatataccagtgaaagtaaaggtgttgaagatagtgatatgattcctgaaggtccaagtgcgaccaccattactcacacaatttctattgatggtttggaaccaagaaataggcgccgcgccattcttagcgcttgcttttcaatgatgggtattaatcaatggctcgttactattaaggaaatagtaggtataacccacattttgcatggacaggttccacaacaacatcacagttcattgcttcgaagtttcttagtgacaaatcactggaagacgaatttgacggatttttggcttaatagtgatgtaacagcgcccttgtggcaacgatttttctattcttcggatacttcaaaagctatgttgggtggaactgaggttgactactacgagctatacgaatatccggcccgagaaggagaagtattacgtccaaactaagttcgcgttttatttaaatttttttctttatagggcattatttgtacttttttttcttacgcgtctttagcaaaggcgggaagtacaataactagttttgt

SEQ ID NO: 2789 - DNA, 795 bp, Saccharomyces cerevisiae
agattatttctagatatacgatgaagtacattattgagcatatggaggaagggtttagtgaatgggtcattttagagtatagccaaatcctgagagaagtaggagctgaaaacttgattttatcatcgttaccagagagtaccacggaaaaggacatccctcaaaggctactaaaacttggtttaagatggactacaaaggatttgaagggcattaacgaagatttcaaggatttggaactgttaaaagatggcagagtctgtctattggaccctagggctacaatcgatttacagccggaggatgctacgaaattcgactatttcgtatttggtggcatattgggtgatcatcctccaagagatcgtaccaaagaactaaagactgcctatccgaatcttttaattagcagaagactaggtgataaacaaatgactacggatactgccataagaacaacacagttgattatcaaagacaggattgcatttgaagacatcaagttcattgactaccctgaatttaggttcaataaaaatgaggccacggaaatgccatttagatacgttttagataaagaaggtaaacctattttgcctgaagggatgttggatttgatcaagaaggattctgctcaaagtttggacgatctgttgatgtagatgagaacagtcctttaagtaacattctatggttgtaataagtgatgatgcttccttgtcaaagagttagttgaaaagtttagggtcgtagcattaattatattgtatatagttcaaaaacgacattcaatga

SEQ ID NO: 2790 - DNA, 424 bp, Saccharomyces cerevisiae
tattgaatctacagaaaaaaaagaatgtccacccttttgaagtctgctaaatctatcgttccattgatggaccgtgtccttgtccaaagaatcaaggcacaagcaaagacagcatccgggttgtatttacctgaaaagaacgtggagaagttaaaccaagctgaagttgttgccgtaggcccgggctttactgatgctaatggtaataaggttgttcctcaagttaaagttggtgaccaagttttgattccacagtttggtggttctaccattaaattgggtaacgacgatgaagttattcttttcagggacgctgaaatcctggctaagattgccaaggactaagaatgatgtcttcttcaacagagattttatatacatactctatatgtatgtacctgtaaataggccattatgtatgaca

SEQ ID NO: 2791 - DNA, 832 bp, Saccharomyces cerevisiae
tttatttcccagctgcctttgaagtagtttcacgagcgctagtgaagttttttcataaatatatattcccaatcatcgctaggaattatgcgcgtttttactttgattgcgattttgtttagttcatctttgttaacacatgcattctcctctaattatgctcctgtaggcatatcattacctgcttttaccaaagaatgtctttactatgatttatcctctgataaagatgtccttgtggtcagttaccaagttttgacaggtgggaatttcgagatagacttcgatattaccgcccctgatggctctgttatcgtcactgaaagacaaaagaagcattctgattttctactgaagtcgtttggtataggtaagtacactttctgtttgagtaataactacggcacttccccaaagaaagttgaaatcaccctcgaaaaggaaaaggaaattgtttcttcccatgaaagcaaagaggacataatcgcaaacaacgccatcgaggaaattgataggaacctgaataagatcaccaaaacaatggattatttaagggctagagaatggagaaacatgtatactgtgagttctactgagtcaagattaacatggctctcattactaattatgggggtaatggttggtatcagtatagtgcaggcattaattattcagttcttttttaccagtcgccaaaaaaactacgtataggttgcttttcaagctcttaaaattgttggatcagctgtgctaaggggaaggcacttttttgtatcatgatcctattttttttgttatttaattatttatgacatacctttatactttagtt

SEQ ID NO: 2792 - DNA, 1631 bp, Saccharomyces cerevisiae
taacattacagaaaatctcgtattgatattgttattgcttaaagggtaatcaaggtaaacaagaaagaagctcctcgttgtccgtaaattttttaataaggagagagaaaaagagagataaccaagaggagaaaaaggaatctgcatcacatttattcaggatagtacgttggctgatttagtactcaggataaaaaattctatttaaataatgagaccgaacaaaacaagtctgcttctggcgttattatccattttatcgcaagcgaacgcctatgaatacgtgaattgttttagctcactaccctctgacttttcaaaggccgattcatataactggcagtcgagttcacactgtaacagtgagtgtagcgcaaaaggtgcaagctactttgccctttataatcattcagaatgttattgtggtgatactaatccatctggttcggaatctacttcctcttcatgtaatacgtattgctttggttacagcagtgagatgtgtggtggtgaagatgcctattctgtgtaccaacttgactctgacacaaatagcaatagcataagcagctcagattcaagtacggagtctacttctgcgtcgtcttccacaacttcttcaacaacgtcctccacaacatcaactacatcatcgactacatcatcaactacatcatcaatggcgtcttcctctacagtacagaattcccccgagtcaactcaagcagctgcctctatttcaacgtcacagagttcgagcactgtaacgtcagaaagctcgctaacttcggatactttggcaacgagcagtactagctctcaatcacaggacgccacttcgataatctattccactacttttcacactgagggcggttccacaatttttgtcacgaacaccatcacggcaagtgcacagaattcaggatcggccacaggtacagctggatctgactctacgagtggaagtaaaactcataaaaagaaagccaatgtaggggcaattgtaggcggcgttgtaggtggtgtagtgggagccgtagccattgctctttgtatcttgttgattgtcagacacattaatatgaagcgggaacaagacaggatggaaaaggaataccaagaggcgataaaaccagttgagtaccctgataaactatacgcctcttcattttcatctaatcacgggccctcttcaggtagcttcgaggaggagcacaccaaagggcaaactgatattaaccctttcgacgactcaaggagaataagtaacggaacattcataaatggcggaccaggagggaaaaacaacgttttaacagtggtcaatccagacgaagctgattgaagaaacccaaaaaaaattattatattcttaaactattgccaagcaagtcttgttccttcccattaattttttctttttccgatttcattttgccaaatcatctccattttcacattatgatgatcctctaaaaattcatacatttcgaatttgagagctggagagctggaagtaacgaggaacattaaataggaacaacaaaattagattagttatttttttttctactcattaatttttttatgatatatttgaataccaaccttaacttagttacatagat

SEQ ID NO: 2793 - DNA, 1154 bp, Saccharomyces cerevisiae
ctgaccaagtgatatcttattaatacaaatctactgtacgatgtcagcatcaaaagaagaaattgctgcccttattgtaaactacttttcttccattgtggaaaagaaagaaatttcagaagatggcgccgattctttaaatgttgctatggactgtatctctgaagcctttggctttgaaagagaagctgtttcaggcattttaggcaagtctgaattcaagggtcaacatcttgctgatatattaaattctgcgtcaagagttccagaatcgaataagaaagacgatgctgagaatgtcgagattaatattccagaagatgatgcggaaactaaagccaaagctgaggacttgaaaatgcaaggtaataaagcaatggccaacaaggattacgaactggcaatcaataaatatactgaagccattaaagttttaccaacgaatgctatttattacgccaatagagcggctgctcattcatccctgaaagaatatgatcaagcggtcaaagacgctgaatctgcaatttctattgacccatcttatttcagaggctactctagattgggttttgctaaatatgcgcaaggtaaacccgaagaagcccttgaagcatacaaaaaggttcttgatatagagggcgataatgcaacagaagctatgaaaagggattatgaaagtgccaagaagaaggttgagcaatctttgaatctggagaaaaccgttccagaacagtcaagggatgctgatgtcgatgcaagtcagggtgctagtgcgggtggattgccagatcttggttctttattaggaggtggtcttggaggtttaatgaacaacccacaattgatgcaggctgcgcaaaaaatgatgagcaatccaggtgcaatgcagaatattcaaaaaatgatgcaagatccaagtatcagacagatggctgaaggctttgcttcaggcggaggaactccaaatttgtctgacttgatgaataacccagcactcagaaacatggcaggcaatctttttggtggagcaggtgcccaatctacagatgaaacaccagacaatgagaacaagcaatagtggactgaaataagcctttaatgcaatacatgttatgtagatacaaatatagctctatctaggatgagtgtta

SEQ ID NO: 2794 - DNA, 575 bp, Saccharomyces cerevisiae
gtttgaagtcaaaaccatttttaaaagggtagagaggcttagtaaaaaatggttcccttatttggtttattttgcattttttctcaattgtactcattatgctccgcatatgttgatatcaccagcggttaccaagtatttttcaacttgccaactaatatgacaaacaatcaaatatgctggctattccaagcatcttactatgatatttattctgataaaagtggtagaacacttagaacgggacggtttgaacccggcgatcagcaatctttgatttatagggataccttagttgagttggaggctattacagattcttatgagtacagtaacctagatctatcgacttataacggacctgagccatataattctgagactgattattgtacagatataatggatttggtaatgcgtgtatatgatgaagaaggacattatgttcatccagttgcgaataactcaacaaatgcttgcgctcatccaactcctcctacgttaaacaatctattgataagtaattattctgacggaagaaattataaagagtcttctatataatggtgtagtaa

SEQ ID NO: 2795 - DNA, 1971 bp, Saccharomyces cerevisiae
tgctcgtgaatgtctctctgaaaatgctggaaactgatcactctaggaatgacaatttagacgataaaagcactgtctgctacagcgaaaagacagatagcaatgttgagaagtctaccacgtctggcttgcgccgtatagacgctgtcaacaaggtcttgtctgactacagctctttcacagcttttggagttacgtttagttcactcaagaccgccctactggtggctctgtttttgcagggttactgtactggactcggagggcagatttcgcaatcaatacaaacctatgccgctaacagttttggaaagcattctcaagtaggatcgatcaataccgtcaaatcaatagtagcctctgttgtcgcagtgccatacgcacgtatatctgatcggtttggacgtatagaatgctggatttttgcgcttgtgctctatactattggagaaattatttctgctgctactccaacgttttccggactttttgcaggtattgttatacaacagttcggttattctggatttcgtcttcttgctacagcactgactggtgatctgtctggattgagagatcgtacatttgcgatgaacatatttctgattcccgtgattataaacacatgggtaagtggaaatattgttagctcagttgctggtaatgttgcaccatataaatggcgttggggctatggaattttttgcatcattgtgcccatctccaccctaatattggtccttccctatgtgtatgctcagtacatttcctggcgcagcggtaagttaccaccattaaaattgaaagaaaaaggacagaccctgcgtcaaacgctctggaaatttgcggatgacataaacttaattggagtcattcttttcactgctttcttagttttagtattattacctctcacaatagctggtggagccacctccaaatggagagagggtcacattattgcaatgattgtggttggtggctgcttaggttttatctttctaatttgggaattaaaatttgctaagaatccatttatcccacgagtatatctaggtgatccaaccatctacgttgcattgctaatggaatttgtatggcgtctaggtttgcagattgagttagagtatttggtcaccgtgttaatggtagcattcggagaatcaacattaagtgcgcagcggatagctcagctttacaattttctacagtcatgcactaatattgttgtcggcattatgctgcatttctatcctcatccgaaagtctttgtagtcgctgggtcgcttcttggtgtcatcggaatgggtcttttgtacaaatacagggtggtatatgacgggatttcgggtcttattggcgctgagattgtggtcggtatagctggtggtatgatacgttttcctatgtggacgctagtgcacgcttcaaccacccacaatgagatggcaactgtcactgggttactaatgtccgtttatcaaatcggagacgcagtaggtgcttccatcgctggtgctatatggactcagcgtctggcaaaggagttgatacagcgactcggctctagtttagggatggcaatctacaaatcaccactcaattatctaaaaaaataccctattggatcagaggttcgtgttcagatgatagaatcctattcgaagattcaacgcttattgataattgtgtccatttcgtttgcggctttcaatgctgttctctgttttttcttgcgtggctttactgtaaacaagaagcaaagtctttccgcagaagaacgagagaaagagaagctcaaaatcaaacaacaatcatggctccgtcgtgtaattggatattgagctggagagtactagcgatacaaatatagtgttaagctctttcctgaactagaattctctttgaaataatcactgttaatgtaagtagtaatcaataatggcgtgtaacagtataatattgttgtct

SEQ ID NO: 2796 - DNA, 2904 bp, Saccharomyces cerevisiae
atgttcaatcgctttaataaacttcaagccgctttggctttggtcctttactcccaaagtgcattgggccaatattataccaacagttcctcaatcgctagtaacagctccaccgccgtttcgtcaacttcatcaggttccgtttccatcagtagttctattgagttgacctcatctacttctgatgtctcgagctctctcactgagttaacgtcatcctccaccgaagtctcgagctccattgctccatcaacctcgtcctctgaagtctcgagctctattacttcatcaggctcttcagtctccggctcatcttctattacttcatcaggctcatcagtctccagttcatcttctgccactgaatcaggctcatccgcctccggttcatcctccgccactgaatcgggctcatcagtctccggttcatctacttccattacatcaggctcatcctccgccactgaatcgggctcatcagtctccggttcaacttctgccactgaatcaggctcatccgcctccggttcatcttctgccactgaatcaggctcatccgcctccggttcatcttctgccacagaatcaggctcatcagtctccggttcatcttctgccacagaatcaggctcatcagtctccggttcatcttctgccacagaatcaggctccgcttcttcggttcctagctcatccggttctgtcacagaatcaggctcatcctcatcagcatctgaatcatctatcacacaatctggtaccgcttccggttcatcagcctccagcacgtccggttctgttacacaatctggttcctccgtttccggttcatcagcttcttctgctccaggtatctcgagttcaattcctcaatcaacctcatcggcttccactgcctctggttctatcacctccggtaccttaagttctattacctcttcggcttctagtgcaactgcaactgcttccaactctctttcttccagcgatggtactatttatttgccttctacaaccatcagtggtgacatcacactcaccggttcagtcattgcaactgaagctgtcgaagtcgctgcaggtggtaagttgaccctacttgatggtgacaaatacgttttctctgctgatttcataatccatggtggcgttttcgtagaaaagtctaagccaacttacccaggtaccgaattcgacatttctggtgaaaactttgatgtatctggtacctttaacgctgaagagcctgctgcttcttccgcatctgcctactccttcactccaggctctttcgataacagtggtgatatttctttgagtctatcagagtccacaaagggcgaagtcacattctctccctactctaactctggtgctttctctttctcaaatgctattctcaatggtggttccgtctctggtttgcagcgtagagctgaatcaggttctgtcaacaacggtgagataaatcttgagaatggcagtacctacgtcgttgtcgaaccagtttctggaagtggtacaatcaacatcatctctggcaacctttacttgcactatccagacacctttactggccaaactgttgtattcaagggtgaaggtgttcttgccgttgacccaaccgaaaccaacactactcctatccctgtggttggatacactggtgaaaaccaaatcgccattacagcagatgtcactgctctttcttacgacagtgctactggtgttttaactgcaacacaaggcaactcacaattctccttctctattggtactgggttctccagttctggcttcaacgtctccgaaggaacatttgctggtgcctatgcttattatctaaattacggaggtgttgttgcttccagcgctacaccctcatccacatctaccacatcaggggctaccaactctacttccggttccacttcattcggtgcttccgtaactggttcaaccgcttccacttcattcggtgcttccgtgactggttcaacggcttccaccttgatttccggctccccatctgtttataccacaacattaacatatgcaacaaccacaagcacagtagttgtctcctgttcagaaacaactgattcgaacggtaacgtctataccattaccacaaccgtaccatgttcatctaccaccgccactatcacttcttgcgatgagaccggatgtcatgtaactacgtctaccggtaccgtcgccactgaaaccgtttcttccaaatcatacaccactgttaccgtcacccactgtgacaacaatggctgtaacaccaagactgtcacttctgaatgtcctgaagaaacttcagcaactactacttctccaaaatcatacactactgttaccgttactcactgtgacgacaacggctgtaacactaagactgtcacctctgaggcccctgaagccacaaccactactgtttctccaaagacatacactaccgctactgttactcagtgcgatgacaatggatgtagcaccaagactgtcacttctgaagctcctaaagaaacttcagaaacttcagaaaccagtgctgcccctaagacatacactactgccactgttactcaatgtgatgacaatggttgtaacgtcaagataatcacctctcaaatacctgaagctacttcaaccgtcaccgcaactagtgcttctccaaagtcatacactactgtcacttctgagggttctaaagcaacctcattgactactgccatttccaaggcttctagtgcaatttccacatactccaaatctgcagctccaataaagacctctactggtatcattgtccagtccgagggtattgccgcaggtttgaatgccaatactttgaatgcattggtcggtattttcgttcttgctttctttaactaa

SEQ ID NO: 2797 - DNA, 911 bp, Saccharomyces cerevisiae
gactccaacaactgaaaaaccgttgtctccatctactacttcaaagacttcatcaagtaatagtataatcaatatggtctgtgatacactggtatatcatccctccgtgacgagattcgtcaaatttctagatggctcagctggcagagaaaaggttctcagattactgcagtatttagcaagatttttagcagtacagaactcatctctcttggccaggcaattacaagctcaatttaccacagtcagaaaatttctgaggtttctgaagcctttaaaccacttgcaggcagctgctaaattctacgataacaagttggccagcgacaacgtcgttagagtctgcaatgttttgaaaaacatcttctttgctgcatatttgtcgttagatcaagtcaatcttttgagaattttgaaagtgattcctgtaaccgttcttaccggtaagaaaatacctcgctggtccaattggtgttggctgttcggcctcctaagtggtctggctatggatcttcgtaagatccaaacatctcatgcccagattgctgcgtttgtcaaggcaaaatcacaaagccaaggcgatgagcatgaggatcacaagaaggtactagggaaggcataccaagacaggtacaccgcgttaagaagactattctgggatgctgcagattcgttcatcgtcctcaacaacctagggtacttgtctagcaacgaagagtatgttgcgctatccggtgttgtcacatctatccttggtatgcaagacatgtggaaagctacatagctttcttttcatcttttttttttatttggctattctccgcttatgtttgattcgacccttctttataatttatttcttatgtatatgacccaatgttccatgtccatacctgtataagattctgagt

SEQ ID NO: 2798 - DNA, 608 bp, Saccharomyces cerevisiae
ggaacagtataacgcagtataacgcagtataacgcagtataacgcagtatggcagttaaaggattaggcaaaccagatcaagtttatgacggttccaaaatcagggtcggtatcattcatgcccgttggaaccgtgtcattattgacgctcttgtgaaaggtgctattgaaagaatggcttcccttggtgtcgaggaaaataacataataattgaaactgttcctggatcctatgaattaccttgggggacaaaaaggtttgttgacagacaagcgaagttgggaaagccgctagatgttgtaattcctattggtgtacttatcaaaggtagtacaatgcactttgaatacatttcagattccaccactcacgcattgatgaacttacaagaaaaagtcgacatgcccgtcatttttggcctcttaacttgcatgactgaagaacaagccctggccagagctggcatcgatgaagcgcactccatgcacaaccatggtgaagattggggtgctgcagcagtggaaatggctgttaagttcggtaaaaatgctttttgaataagcgcagagaaatctatactatatatgtatatatactcactatagaa

SEQ ID NO: 2799 - DNA, 797 bp, Saccharomyces cerevisiae
cttcctaggagttttacgaaaaataaaagcatttttgtctgaaaactagtgaaaggaagaaaaatgtccgttgaagaagttagcaagaagtttgaagaaaacgtttcagtcgatgataccacagctactccaaagactgttttaagtgacagtgctcacttcgatgtcaagcacccattgaacaccaaatggactttatggtacacaaagccagccgtcgataaatctgagtcgtggtctgatctattacgtcccgtcacttcattccaaactgttgaagaattttgggctatcattcaaaatattcctgagccacacgaactaccattgaaatcagattaccacgtcttccgtaatgacgttagacctgaatgggaagatgaagccaatgctaaaggtggtaaatggtctttccaacttagaggaaaaggtgctgatattgatgaattatggctaagaactttactagcagttattggtgaaacaattgatgaagacgactcccaaattaacggtgtcgttttaagcattagaaaaggtggtaacaagtttgccttatggactaaatctgaagacaaagaaccactattgagaattggtggtaaattcaagcaagttttaaaattaaccgatgacgggcatttggaattctttccacattccagtgccaatggtagacaccctcaaccatcaatcaccttgtaagatagtctgaatttttcttaagataattgttattttaatcaaaattatatatataatcataatataatatatatacattctactagttagga

SEQ ID NO: 2800 - DNA, 1707 bp, Saccharomyces cerevisiae
tagagggtgttaaaaagtctgatacgctcatatacgagtaacactaaaccggaaatactaggagagcccagtacttatacttcttatttggcttcaagttccactgccctcgaaacaaattaccttacgcgatttttaatattttagatataaggaaaaggaagaaaagggataacgaacgcgttttttccgctggaagtttgaaaatgggtggttcttccgattcagactctcacgatggatatttgacttccgaatataattcctcgaattctcttttttcacttaacaccggtaacagctattcaagcgcatctctcgacagagccactttagattgtcaagattctgtttttttcgataatcacaaaagttcactgctgtctacagaggtcccaaggtttatttctaacgacccgttacacttacccattacactgaattacaaaagagacaatgcagaccctacgtatacaaatggaaaagttaacaagtttatgattgttttgattgggctaccagctactgggaagtctaccatttcttctcatttaattcaatgtttgaagaacaatccgctaactaattcattacgctgtaaagtttttaatgctggtaagataagaaggcaaatcagttgtgctaccatttcaaagcctttgcttttgtcgaatacatcttcggaagacttatttaatccgaaaaataacgataaaaaggaaacgtatgccaggatcactttgcaaaagttgtttcacgaaatcaacaacgatgaatgtgacgtgggaatcttcgacgccacaaattcgaccatcgaaagaagaagatttatatttgaggaggtttgttcgttcaatacagatgagctttctagtttcaatttggtgcccataatcttacaggtgtcatgttttaacagaagctttatcaaatacaatatccacaataaatcgtttaatgaagactacttagacaaaccttatgaacttgccatcaaagattttgcaaagagattaaaacattactattcgcagtttacacctttctcccttgatgagttcaatcaaatccatcgatatatcagccaacatgaagaaatcgatacgagcttatttttcttcaatgttattaatgcgggcgtcgttgagccacattctttaaatcaaagtcattacccttcaacctgcggcaagcaaattagggacaccattatggttattgaaaatttcatcaatcactattctcagatgtttggttttgaatacatcgaagctgttaaattgttttttgaaagttttggaaatagctcagaggaaactttaactacactagactctgttgttaatgataaattttttgatgatttgcagagcctaattgaaagcaacggatttgcttgactgatactttaccatacgggagttgaatatcggtactcctttattatatttatgatcctctccagaactccatctacctcccgccttttaatgaccatttttacgaccttttcgcatgtttttctattcttttacagtttccttggtaccgctagttacattatgttatcttgaaaaggctactatacactttttttgcactactgaagcagctttcaaaagctctttatagacttcagatagtattactttttccttaaaattctatctatttgtaaacgaccaagagtgtcattatgtatactat

SEQ ID NO: 2801 - DNA, 1330 bp, Saccharomyces cerevisiae
gacactaaaaaacaaacaaaaaaaaagaaaatactacatacattttgcttttagcactaacatacctaatgcttaaagtgaataacgttttcgggagcaaccccaatagaatgacaaaattggaggatgaacactactttatcgatgacatcgtatcgattaaaaacagacaaaagagcaaaatgtacgtcagggaagggaaacggataggccacggctcgtttggaactgtgacacagtccattctgtcgagcaatagtattgaatggctaggaccttatgccataaaaagagtagtgaaatctcccaaagtacaatctttggaattggagatcttacagaatatcagacatccaaatctggttactttagagttcttcttcgagagccactgtactaccaaggacggtgggcacttatatcagaaaaactttgttatggaatacattcctcaaaccttaagttctgaaattcatgaatattttgacaatggttctaagatgcctacaaaacatatcaagctgtacacattccaaatacttcgagcacttctgaccttacattccatgagtatatgccatggcgatctgaaaccgagcaatatattgattataccaagtagcggtattgctaaagtgtgtgactttggctcggcacagcgactggatgataatacagaattgaagacctatttttgctcgaggttttatagagcacctgaacttctcctaaattcgaaggattatacaactcaaatagatatatggtcgcttggttgtataataggcgaaatgataaaaggccagccactttttaaaggcgatagcgctaactcacaactggaggagatagctaaactattaggccgctttcctaaaagttctataaaaaattctcaagagttacaggatagcttaaatgaccaaaaattcaagaagtttatgcattggtttccctctatagaattttttgatgtggaattcttgctaaaggtgttgacgtatgatgccactgaaaggtgcgatgctagacaattgatggctcacgaattttttgacgcgttaagaaatgaaacctattttttgccaagaggttcgagtatgccggttcacctaccagacctctttaattttagtgcatcggagaaaagggctcttggagagtattacaacttgattgtgccatctctggattagttgctgattcttacctcatttttgcatttgccgtcatcttatgtttccttcttaccacattacttgcattttttctcagactgtccttttatgtgaaacattacaaatatattggaatgtacatactcctatct

SEQ ID NO: 2802 - DNA, 1514 bp, Saccharomyces cerevisiae
aagatttatcgatatgagataaagattgctgcatgattctccttctgattctttttccctgtatatattttctccccttctgtataaatcgtacagtcagaagtagtccagaatatagtgctgcagactattacaaaagttcaatacaatatcataaaagttatagtaacatgcctcactcagttacaccatccatagaacaagattcgttaaaaattgccattttaggtgctgccggtggtatcgggcagtcgttatcgctgcttttgaaagctcagttgcaataccagttaaaggagagcaaccggagcgttacccacattcatctggctctttacgatgtcaaccaagaagccatcaacggtgttaccgccgacttgtctcatatagacacccccatttccgtgtcgagccactctcctgcaggtggcattgagaactgtttgcataacgcttctattgttgtcattcctgcaggtgttccaagaaaacctggcatgactcgtgatgacttatttaacgtgaatgctggtatcattagccagctcggtgattctattgcagaatgttgtgatctttccaaggtcttcgttcttgtcatttccaaccctgttaattctttagtcccagtgatggtttctaacattcttaagaaccatcctcagtctagaaattccggcattgaaagaaggatcatgggtgtcaccaagctcgacattgtcagagcgtccacttttctacgtgagataaacattgagtcagggctaactcctcgtgttaactccatgcctgacgtccctgtaattggcgggcattctggcgagactattattccgttgttttcacagtcaaacttcctatcgagattaaatgaggatcaattgaaatatttaatacatagagtccaatacggtggtgatgaagtggtcaaggccaagaacggtaaaggtagtgctaccttatcgatggcccatgccggttataagtgtgttgtccaatttgtttctttgttattgggtaacattgagcagatccatggaacctactatgtgccattaaaagatgcgaacaacttccccattgctcctggggcagatcaattattgcctctggtggacggtgcagactactttgccataccattaactattactacaaagggtgtttcctatgtggattatgacatcgttaataggatgaacgacatggaacgcaaccaaatgttgccaatttgcgtctcccagttaaagaaaaatatcgataagggcttggaattcgttgcatcgagatctgcatcatcttaatgagcatcggaccgaagcataagaatgcagcaaattgataatattcccgttaagccagtcgtaggaaaaggaaaagaatgagtagcaaatgtcacacaacaaacgcgcaccatccctacatacacaaacacacacacacacacacatatatatatattctaccccatataagcgagtgattcatcatgaaaagaatttatcacttcgaat

SEQ ID NO: 2803 - DNA, 1390 bp, Saccharomyces cerevisiae
taaacacattgtatataaggtaaaaacggcagcatgaagaaatatctgctgtatatggtacaagttcatttgaactttagaagagcagaactggaatcgttagcagacctatataatctttccatagacttttcgcagtacgatgccaatagccctttctttattgtagagctggaaaatgatcagcaagcaaaggattggattaagaggtctattttaaccagaggtatttatgagtattgggggcagggtacaacgctcgatgagctgcataaagatattcagcgtcagtctaactttgaacaggatctgcaattgaaattcaaacattccacttttaagttcgaattcgaatgctataaaggcaacagtaaagctaagagggtagagcagattgaaactttccgttaccttggctttgaaggaaagattgatatgaaacatcctcaagaggttttcactgttatagaagagtacacaccaatatcggaaaacgttggtggtaagacccccaccaggatttattttggtaggcaggttcagatgagcaataggagtgccatggagaaatatgatttgaagaaaagaccttataaaggtacaactagcttcgaagcagaattatcgttggtcagcgccaatatagctcaagtgaaaccgggaactataatgtacgacccgtttgcaggtacaggatcctttttggtagctggtgggcattttggttctttagtgattggttcggatatagatggcagaatgattcgtggtaagggtgctcaagtgaacatttcggccaacttcaaaaaatatggcgagagttctcaattcctcgacgtgttgaccatggactttacaaataacgcattaagaaacaatcttgtcattgatactattttgtgtgatcctccatatggtatcagagaaagcataaaagtcctaggtgctaaggatccagaaagatttctaggcaaggaagatatggaaattgacggtgaaaaggcatatttgcgtcgcgattatattccaaccaaaaaaccgtatgctctagattcattactggatgatcttttacaatactcttccgaaagattaccgattggcggaagattagccttctggatgcccactgcaaacgacgccaatattgaaactattgtcccaatgcacgaaaatctagagctaaaatacaactgcgttcaagaattcaataaatggtcaaggagactactggtttatattaataggggtagcactttcaatggatcaagtaatcatggcataaaacgttcaaaagataatttcagggagcggtacttcaataattttaactgaaatgatgcataagccctttgtaattttaagatatatttacttactctttctctta

SEQ ID NO: 2804 - DNA, 2013 bp, Saccharomyces cerevisiae
catcattgtgcgagcatattaatatttcatgaataggtagaaagatatatatcagcagaaaaactaactttctcaattaggtcaaaatggtgaacgttggtccttctcatgctgcagttgctgtggatgctagcgaagcccgcaaaagaaatatttcagaagaagtattcgaactgagggataagaaagattctacagtggtaattgagggtgaagccccggtaagaacttttaccagtagctctagtaaccatgaaagagaggatacgtatgtttctaaaaggcaggtaatgagagatatttttgctaaatacttgaagttcattggacctggattgatggttagtgtggcttacatcgatcccggtaattactctactgccgtcgatgcaggtgcctctaatcaattttccctactttgtatcattttgttatcaaactttattgccatatttttgcaatgtctgtgtatcaagttgggttccgttacgggactagatctaagtcgagcttgcagagagtatttaccacggtggctcaactggacattgtatttttttgcagaatgtgccgttatagccaccgatatagctgaagtgattggtacagcgattgccttgaatatcctgatcaaagtgccccttccagcgggcgtggccattactgttgtggatgtgtttttgattatgtttacatataaacctggtgcgtcatcaattaggttcattagaatatttgaatgttttgttgcagtattagttgttggcgtgtgcatttgtttcgcaatagaattggcttatatcccgaagagtacgtccgttaaacaagtgttcagaggatttgtgccatctgcccaaatgtttgaccacaatggtatttataccgctatttccatcttaggtgctactgttatgccacattcgttgtttttgggttccgctttagtgcagccaaggcttttagattatgacgttaaacacggtaattatactgtttctgaagaacaagataaagtgaaaaaatctaaatccactgaagagattatggaagaaaaatattttaattatagacccacgaacgctgctatcaaatattgcatgaaatattctatggtcgaattaagcataactctcttcaccctagcgcttttcgtcaattgtgccatcctagttgttgcgggctccactctatataactcaccagaagcagatggggcagatttgtttactattcatgaattattatcaagaaatctggcacccgcagcaggtacgattttcatgctcgcacttttattaagtggtcaatccgcaggtgtagtgtgtactatgtcgggtcaaattgtaagtgagggtcatattaattggaagttgcagccatggcaaagaagattggccactagatgtatttcgataatcccttgtttggtcatctctatctgtatcggtagagaagctttatcaaaggccttaaatgcttcccaagttgttttatccatagttctgccatttttggtagcacctttaattttcttcacatgtaaaaaatcaatcatgaaaaccgaaattaccgtcgaccatactgaagaagatagccataaccatcaaaataacaacgatagatctgcaggtagcgtaatcgagcaagatggttctagtggcatggagatagaaaatggaaaagatgtcaaaatcgtttatatggcaaacaattggattatcactgttattgctataattgtgtggcttttcttatctttactgaacgtttatgccattgttcaattaggcatgtctcatggtgatatcagttaatgtctgcctcttacattcttgcgcacaataacattaagattatttgtaagctttatgacagctgtacttcaagtagagcttgtgattatacattctagcatagtgaaaaaaaaataataactattcgaaactaatacacgtacatgtatatatatattataaattgcttatgcttatttaatagaagggttgttgaatt

SEQ ID NO: 2805 - DNA, 537 bp, Saccharomyces cerevisiae
atattttagcttgaaagcgaagtgatacgatcgacaaatagagtaaaaatgccaggtgtttccgttagagacgttgctgctcaagatttcattaatgcttacgcttctttcttgcaaagacaaggtaagctagaagttccaggttacgttgacattgtcaagacctcttctggtaacgaaatgccaccacaagatgccgaaggttggttctacaagcgtgctgcctctgttgccagacacatttacatgagaaaacaagttggtgttggtaaattgaacaaattatacggtggtgccaagagcagaggtgttagaccatacaagcacattgacgcttccggttctatcaacagaaaggttttgcaagctttggaaaagattggtatcgtcgaaatctctccaaagggtggtagaagaatctctgaaaacggtcaaagagatttggatcgtattgccgctcaaactttggaagaagacgaataaatataaaatctataatttatatatatatactactactacaattatcatcataca

SEQ ID NO: 2806 - DNA, 651 bp, Saccharomyces cerevisiae
tcaagcttacggattcacaatgggtatcgatcacacttccaagcaacacaagagatctggtcacagaactgctccaaagtctgacaatgtctacttgaaattgttagtcaaattatacactttcttagctcgtcgtactgatgctccattcaacaaggttgtcttgaaggctttgttcttgtctaagatcaacagaccacctgtttctgtctctagaattgctagagctttgaagcaagaaggtgctgctaacaagactgttgtcgttgttggtactgttactgacgatgccagaatctttgaattcccaaagaccactgttgctgctttgagattcactgctggtgccagagccaagattgttaaggctggtggtgaatgtatcactttggatcaattagctgtcagagctccaaagggtcaaaacactttgatcttgagaggtccaagaaactccagagaagctgtcagacacttcggtatgggtccacacaagggtaaggctccaagaatcttgtccaccggtagaaagttcgaaagagctagaggtagaagaagatctaagggtttcaaggtgtaagttaactgaaatgaaaatttcatatttacttttttattgttactcatttgtaattcataaactacatacac

SEQ ID NO: 2807 - DNA, 805 bp, Saccharomyces cerevisiae
aactacgaccaaaaaaaacaaaggaaaaacgaaaagaagaaaacatgcacaggagaacatagttggagaaaagggttagaacagaccgatacagagataaactagcgaagaataataactttatacaaaattaatcatgagcacatccgccagcggtccagaacacgagttcgttagtaaattcttgaccttagccactttaactgaaccgaagctaccaaaaagctatactaaacctctgaaggatgttaccaatttgggtgtcccgttgcctactttgaagtataaatataagcagaatcgtgccaagaagttaaaactgcaccaagatcagcaaggtcaagacaacgccgccgtccacttaaccttaaagaaaattcaagctcccaagttctccatcgagcatgatttcagcccatcagatactatcttacaaataaaacagcacttgatcagcgaggaaaaggcctcccacataagcgagataaaactgcttttgaagggcaaagtcctccacgataacctgttcttatcggatttgaaggtcacgcctgccaattccacaatcacagtcatgattaagccgaatccgactatatctaaggaacccgaagccgagaaatccactaactcccctgctcctgctcctccacaggaactcactgtgccctgggatgatatcgaggctcttctgaagaacaatttcgagaacgatcaggctgcggttaggcaagtcatggagcgtctacaaaaaggctggtctctggccaaataagattagtatagttagtacgtacatacttgt

SEQ ID NO: 2808 - DNA, 834 bp, Saccharomyces cerevisiae
ttattacagaattgagcagaatgactgggaaaggtggacttgacaatgcgccaggtactacaaaaagataaaagggatgtacagctttccaaagctttatcatatctgcttcgacatacagcggtgaaagaaaagttgactattgactcaaacggttatacaccgctgaaagaactattgtctcataatagattgaaaactcataaatgtacggtggatgatatccatcgcattgttaaggaaaatgacaaacaacgctttcatataaaaacgttaggagcggacgaagaatggatctgtgctactcagggacattcaatcaaatcgattcagccatcagatgaggttctcgtaccaattactgaagcgtcgcagttaccacaggaactaattcatggaacaaatcttcaatctgtcataaagattattgaatccggagcaatatcaccaatgagtagaaatcatgtccatttatcgccggggatgttgcacgcgaagggagttattagtggaatgcgttcttcaagtaacgtctatattttcatcgactgccattctccattattctttcaaactttgaaaatgttcaggtcgctcaataatgtttacttaagcagcagtattcccgttgaattgatccaaaaagttgtagttaaaggaaacttgaaagatgaggagaagttagatactttaagaagaattttacacgaaagaaacataccgctcgaaaagatataactttcatcaagctcaacttttatgaatttttatttttaaatacttcgctcttacttatatatttaaataaaaacttttaagattagatgaaatgaa

SEQ ID NO: 2809 - DNA, 3434 bp, Saccharomyces cerevisiae
aagttgaaagtgacccaaaaaacggcacgaagaccaattatacgcactttcaacacagttcgtcgaatcttcacaatggggttcaagaagctcgtatcattccaaccggattatgtcccacaataccatataactaaatatatctcggaacgaactaaactgcaactggtacatataaaccacaaaacctccccattggttcacggttactttgctgttcctacagaatgtcttaatgattcaggtgctccgcataccttggagcatttgatcttcatgggttctaaatcttacccatacaaaggtttattagacacagctggtaatctgtctttgtctaacaccaatgcttggactgataccgaccaaactgtttatacattaagcagtgctggctggaagggattctcaaagttgctacctgcttatctagatcacatcctacatccaactttaacagacgaggcttgtttaactgaggtttatcacatcgacccggaaaatttgggtgataaaggtgtggtatttagtgaaatggaagccattgaaactcagggctggtacatttcagggttagaaaagcagcgattaatgtttcctgaaggaagtggctatcggtcagaaactggtgggctaacgaaaaatttaagaaccttaaccaacgacgaaatcagacaatttcacaaatctctgtattcttctgataatctttgtgtcattgtttgtggtaacgtaccaacagatgaactgttaaccgtcatggaagaatgggataacaaattgccggagattccatcgaatataccaaagaaaagaccatttttggacaacaagctttcgcacataccgcaatctagagataaagttacggaatctactgtagaatttcctgaacttgatgaaagtcagggtgaattactcttttcttggattggtgttccctactcagattttcgtaatgacctagcggttgatgtgctattagattactttactgactctgcattggcagtgtttacaagagaactggttgaaattgacgatcccatggcaaattccactgattgttgcactgattatttcatgagaaccataattgatcttcgtatccaaggtgtcccaacagaaaaaatagcagcaacaaagaccaaggtactggagattttgaaaacccataccattgatttatcaagagttagacaggtagttgaaaatactaaatgggaatatttgctgaactatgaaaaaaatggcgagagtcgtttttctagtgctgtgattaccgactatatttatggtaatgaagatggttcttcattagtgtcttctctcaaggatttaagtgattttgatgctttattacaatggtcccaaaaggactggcaatctttgctgaacagaatattcgtagacaacaaacctatcatagttaccgctaaaccaagcgctttgatgtatgaacaactagagaaagaaaaatcggatttgatcaaacaaagagaagctgaatttgatgatgaaaagaaactggttttattgaaaagattgaacaatgcaaaaaatattaatgataggccaattccgaaatctctactacagaaatttgagattgataatccttcaaagagtgttgaatttgtcaacacgaaaagcattgcaactgtcgattcgtataaatacaataatgttagtgatccgctgaccaaaaaaattttagaaacgaggccagacaattttcctcttttcattcacttaaatcatttcccgtctcaatttatagagctgcattttttggtcaactccgcatctattaaggatacctcgcttttaccatattttaatatgtttgacgagctattttccatgccaatgaaaatccttgatgaggagagtaatgtagaaactatgctctcgtttgaggaagttgtcgccaagttaaaatcagaaactattgacgcacagatcaaccaaggtttgaagggttcttgtcctgaccttattaattttaaaattcaatgtagagctgggggttactctaactctgttcaatggatcaagcactgcctatttgacatggtttttgatgaaaatcgtgttcgtattctgctggagaattatttgaattctattgtagaatggaaaagaaatggtaatgttatgttaagttctttaactaacagaaatctctattcggcaagatcgctgaaaaaatccaccgatccattatttgttgaagcaaaattacaagagatttttgcagaaattgagaatggcaactttgagaaagaaattttgccaagaatagaaacaatgagaaagcaactgagagcaaatttcaacaagtttcatattttggttcttggtgacatctcaaagatcgatgacgtttatgaaccatggaatcccttaattaagtgcttgaacattgcacatccagttgagaagttaaaaattccaccagttccaagagccctagataccatttcatcgatttgcagaacacctggtgaaaaggcctttataataactactcccgcctcagaatctgcttatatgaatctaataacgtctatcccatttaacttggactaccatgatcccgaatacgctattgtctcattggcttccgaatatctagaatgtgttgaaggtccattttggaagggaatccgtggtgccggattggcctatggtgccagcatgttaaaattatgtgagataaattcttggggattcaatatttaccgcggcgctgatattattaaatgttatgaagttggaaaacagattgttcaagattatgcatcaggtgccttggaatttgatgagcagttaatccaaggtgccatcagtagtattattaacaggctggctactatcgaatgcggatactttgaaacagccctgtccaaatatgttgatgaattctgtttgcaaagggggaacaacttcaatgaattgtatttggaaaggttgcagaatgttaccaaaacagatctgaaaaatgccatgcagaaatattttgtcaacatgtttgattccaataaaagcgttgcctttgtgagctgtcatccagctaaattggaatcagttcaagaattctttgaaactcaaggtttcactgtcgaaatagaagagctagaagatgacgatgacgaaattgatagtgaagaagacgaaaatgcgtgagtacatgacctccatttcagcttcactttcaacacagaaacagtgcgtattatctgcattcaataaatagcaaaaggagcattgtctcattcttttcgaattctgggattctgccttacggcgctctttcatttgattgatcgagaattattattatatttatatgagtacttgaaattcctcatatatttatttttagagtatttaagtagcttgatgaaaacattagataaaattactaatta

SEQ ID NO: 2810 - DNA, 1438 bp, Saccharomyces cerevisiae
taacaaaaaatagtcgtagaacaacgatgagcaacgacgaaactgtagagaaagtcacccaacaagtgtcggaactaaaaagcacagatgttaaagagcaagtagttacaccttgggatgtggaaggtggggttgatgaacaaggtagagcccaaaatattgattacgacaaattgatcaaacaattcggtactaagccggtcaacgaagaaaccctgaagagattcaagcaagtgacgggtcgtgaaccacatcattttttgcgtaagggattgtttttcagtgagcgtgacttcactaaaatattagacctttacgaacaaggcaaaccatttttcctatacactggtagaggtccttcgagcgattctatgcacttgggtcatatgatcccttttgtcttcaccaaatggttacaggaagtgtttgacgtaccattagtcatagagttgacagatgacgaaaaatttttattcaaacacaagttgaccatcaatgacgttaagaattttgcccgtgaaaatgccaaggatatcattgctgttggctttgatccaaagaacacctttatcttttctgatttgcaatacatgggtggtgcattttacgaaactgtagtaagagtttccagacaaattacaggatccactgcaaaggctgttttcgggtttaatgactccgactgtattggtaagttccattttgcctccattcaaattgctaccgcattcccaagctcatttcctaatgtgttaggcttgcctgataagacaccatgtttgattccatgtgcaattgaccaagatccatatttcagagtttgtagggatgtcgcggataaattgaagtactccaaacctgctttgcttcattccagattctttccagctttgcaaggttccacgaccaaaatgtcagcctctgatgataccactgccattttcatgaccgatacaccaaagcaaattcaaaagaaaattaacaagtacgcattcagcggtggtcaagtgtccgccgacctacatagagaattaggtggtaatcccgatgtcgatgttgcataccaatacttgtcatttttcaaggatgacgatgttttcttgaaggaatgctatgacaaatataagtccggtgaattactatcaggtgaaatgaagaaactgtgtatcgagactctgcaagaattcgttaaggcgttccaggaacgcagagctcaggtggacgaagagaccttggacaaattcatggtcccacataagttggtttggggcgaaaaggaaagacttgtcgcacctaagccaaaaactaagcaagaaaagaagtaagtagtcacgcttattctgacgctattatatacaatgatatagaatccgaaattgtagtttaacactaaaaaaataatgcaatagaacaatagtgttgcgatgtctcctgacct

SEQ ID NO: 2811 - DNA, 1026 bp, Saccharomyces cerevisiae
cttataatgtccaaaactttatctttgcaacttccatgggttgagaaataccgtccccaagttttatctgatatagtcggtaataaagagaccattgatagacttcagcaaatcgctaaagatggtaacatgccccatatgatcatatcaggtatgccaggtataggtaagaccacttcggtacattgccttgctcacgagctccttggccgctcttatgctgacggtgttttagagttgaacgcttcagatgacagaggtattgatgtcgtcagaaaccaaataaaacattttgcccagaagaaactacatttgcctccagggaaacataaaatcgttattcttgatgaggcggattccatgactgctggtgctcagcaagcgttgagaaggaccatggagctatattcgaactctacaaggtttgcatttgcttgtaatcaatcaaacaagatcattgagccgctgcaaagtagatgtgcgattttgaggtattctaaactatccgatgaagacgttctaaaacgtcttttacaaatcataaagctagaggatgttaagtatacaaatgatgggttagaagcaatcatttttacagcggagggtgacatgagacaggccataaacaatctacaaagtacagtagcaggacacggtttagtgaacgcagacaatgtcttcaaaattgttgattctcctcaccctctaatagtgaagaaaatgttactagcctccaacctagaagattcaattcaaatcttaagaacagatctttggaaaaagggttattcctcgattgatatcgtcacaacatctttccgcgttaccaaaaacttagcacaagtgaaagaatcagtaagattggaaatgataaaagaaatcggtttgacccatatgagaattctggagggtgttggaacgtacttgcaactggctagtatgttagcgaaaattcataaactaaataataaagcctgatttaaatatccgaaaactataaaaaaaactcccatattagtgcattac

SEQ ID NO: 2812 - DNA, 1033 bp, Saccharomyces cerevisiae
gcataacaacaaaacaacagaaaaaaaacacagcgagtctagtgcaagtacgtcggcaaagtaaaacacaaaggagatgaaattgcacggctttttattttccgtattatcaacatgcgtcgtcattttaccagcgttggcctacagtgaagctgtcacgatggtcaagtcgattgagcagtacttcgatatctgcaataggaatgattcttacacaatgataaaatactacacttcttggtgccaacattgtaaaactctggccccagtatacgaagagcttggtgagctatacgccaaaaaagctaataaagatgataccccaattaacttccttgaagttaactgtgaattcttcgggccaactttatgtaccgacttgcctggatttccaataattgaactggtcaaacctcgtactaagcccttagttcttccgaagctcgattggtcgtctatgaaatttcatgaaagactatggcaaagaatcaagacgtggttcaacaatcctaagtaccaactggatacgtctagggttgttcgttttgaagggagtaggaacctaaagagtttaagcaactttatcgatactgtaagaagtaaagatacagaagaaagattcatagaacatattttcgatgattctaggaattgcaatgaagaattacgttctcaacagcttctgtgtaaagctggtaaagaatactactctgatactttatctaaattatacggtgacgtgaatgggctggaaaaggaaaggcgaagactagaagctttaattaagcaaaatggagatgacttgagtaaagaagttaaagaaaaactgaaaatcattcgtctacaattgagcctattatcacacatagaagaccagttagaagataccagtagtcatgacgagctttgaacataagcttcgctctgtcttttactttacgaataccgactacagacggaagcgggaccctcaccctgaggtacaacaaatacacagatacatatatatttaacaatgtacgttagccgcaat

SEQ ID NO: 2813 - DNA, 1154 bp, Saccharomyces cerevisiae
caagctataccaagcatacaatcaactatctcatatacaatgtctatcccagaaactcaaaaaggtgttatcttctacgaatcccacggtaagttggaatacaaagatattccagttccaaagccaaaggccaacgaattgttgatcaacgttaaatactctggtgtctgtcacactgacttgcacgcttggcacggtgactggccattgccagttaagctaccattagtcggtggtcacgaaggtgccggtgtcgttgtcggcatgggtgaaaacgttaagggctggaagatcggtgactacgccggtatcaaatggttgaacggttcttgtatggcctgtgaatactgtgaattgggtaacgaatccaactgtcctcacgctgacttgtctggttacacccacgacggttctttccaacaatacgctaccgctgacgctgttcaagccgctcacattcctcaaggtaccgacttggcccaagtcgcccccatcttgtgtgctggtatcaccgtctacaaggctttgaagtctgctaacttgatggccggtcactgggttgctatctccggtgctgctggtggtctaggttctttggctgttcaatacgccaaggctatgggttacagagtcttgggtattgacggtggtgaaggtaaggaagaattattcagatccatcggtggtgaagtcttcattgacttcactaaggaaaaggacattgtcggtgctgttctaaaggccactgacggtggtgctcacggtgtcatcaacgtttccgtttccgaagccgctattgaagcttctaccagatacgttagagctaacggtaccaccgttttggtcggtatgccagctggtgccaagtgttgttctgatgtcttcaaccaagtcgtcaagtccatctctattgttggttcttacgtcggtaacagagctgacaccagagaagctttggacttcttcgccagaggtttggtcaagtctccaatcaaggttgtcggcttgtctaccttgccagaaatttacgaaaagatggaaaagggtcaaatcgttggtagatacgttgttgacacttctaaataagcgaatttcttatgatttatgatttttattattaaataagttataaaaaaaataagtgtatacaaatt

SEQ ID NO: 2814 - DNA, 971 bp, Saccharomyces cerevisiae
gtctttctttatacattcgtcaggtgttgaaagagttcaaccaaagatgtcttctatctacaaagccctcgcaggaaagagcaaagataataaatctgaaaagaagcaaggcaatgtcaagcaatttatgaacaagcaaagaactcttctgatttcgagtagaggtgttaactatagacatcgtcatttaattcaagacttaagcggattattgcctcattccagaaaggagccaaaattggatactaaaaaggatcttcaacagttgaacgaaatcgctgagttgtacaattgtaataatgttctattctttgaggccagaaaacaccaagatttgtatctatggttatccaagccgccaaatgggccaactataaaattttacattcaaaacttgcatactatggatgagttgaattttacaggtaactgtttaaagggttctcgtccggtattgtcgtttgatcaacgtttcgaatcctccccacactaccaattaattaaggagttgctagtgcataatttttgtgtaccaccaaatgctagaaaatctaagccatttattgatcacgtcatgtccttcagtattgtagatgataaaatatgggtgaggacatatgagatctcacacagtactaagaacaaagaagaatatgaagatggcgaagaagacatatcattagtggaaattggccctaggtttgttatgactgtcattttgatcctagaaggttcatttggtggtccaaagatctatgaaaataaacaatatgtttcgccaaacgtcgtaagagctcaaattaaacaacaagctgctgaggaggcaaagtctagagctgaagctgctgtggaaagaaaaattaagagaagagagaatgttcttgccgccgatcctttatcaaacgatgccttgtttaaataataagcataatactatcagagagttttacataacattgtatattaaaaag

SEQ ID NO: 2815 - DNA, 1048 bp, Saccharomyces cerevisiae
aaaaagcaaacacaatagtctacaaataatgtctatggagcctcctgtggggcttacggctatgcccgtcaccaagctagccatgatcacgacgcttgtggttcccttagttgcctcgattgcaagttacaaacatatatttctattgcaatatgatccttttctgcagacctaccatcaatactaccgtctgctcatattccagttctgcgccatcaatgaatccgatacagtaatactggcgttgatatggtatctgtttaggcatttagaacggctactaggatcccacaagtacttgaccttgattgttttgtcatgggcctacaccaccttaggaatttggggattgaatctgatctggaacgcatttattggacagtacaagtggcttcaatggaacaattttagtacaggttcactgcccattgttttaagcttagtacatttttacaaagaatacacccctcagatttacgaatggaatataagattactaggacctcgaggaggagcatcaagtcacaatgataacaagcgagaagacaagagcgccgtagagtggaaaatcaacgatcagtttcttttaaatgggttaattctcctgcttatattaaatcaggggtttgcaggaatactatgcggattcataagctggatgtgtggtattttcatcgataagggcctgttaccgggattagaccattggagaataccgtttgtatcctatttcatctctcaaggcccacccacgagggctaacgttgctatagcggccaatgcggccacgaatacagcagcagcaagagccactgtagaagcagctactgctgctacaggaaatggaaatacaggcaactctgggcctacaagcctaccgcttcgtggttcaagcaccacccctacaaatacctctagcgctggtgatgacgagcctggtgccgatgaacctgcaagaccactgggagtccaatttttggatacctttaggagatgatttatatcagcatatacctacataaacaaataaacatagcaacggtttagc

SEQ ID NO: 2816 - DNA, 1660 bp, Saccharomyces cerevisiae
gtgtataagtatgtcagaagagagggaagaaaacgggatatctagggctacgctgaatacgcagcgactttcagcaatgatcgattcactgaacaatgagaaagatgacaggctctttccatctcccacaactaccaggacaatgatcacagaggaaaaggcggatcaaagtgatgtctttaaaccaccatcgagattgttgagatcacctgctggtgacgtttcgctgccacctggtgataacagatcaagtatgatttccaactactctggaattattcaagaaggcgttgaagtatcatatgtggtcaaaaaccggcaacagacccaagaacggcgcacaagtaaggattccaatagtttgtactccttgaaagagcccgtgagcaagaacgagttaccgtcgttgcccatgttgccttcagaagcgacattgacaaaacatctaagtgataaccaaagcacaaaatcgaataccaatgcagacgaaattgtcattaaaccagttactaatgccaaacctgtgggaaggtttaactctaacacttcaaaaaaagtagagggtcgtggctcactgaaactgttatctagtcctctacgtcaggaaaaagttatgcgttcctctataggatcaggtaatttggccagcgagagcggatcttccacttataataccaaattccatcaatctattcaagagcagctcgaagaagaagaggaaggaaatgttagcgataagctttcaattgtttccagtgtcatacccgagttgtatacaaccaccaacgaagcacccaaagcgataaacccaatacgttctgaaaccaatgactacaatccaactattccgcccagaagtaaggaccgtcctaggtcaaggttgttcatcgaagaaggtgatggcgagggggatcttttaaccgaagaaatattaccaacgccggtccaacctggtggccactataagaactcatctcagatttccacagttagtgaacaaaaatcggaatcttactattctgcggcaacgagtatgcctccagaggaagagacttacttgacaagaccattgcccagcacacccaatgaggatagcagagttacatcgaatttgaaacgtgacgacacattgaaggctattcatgatagggcaaatcatacctctacttcgacaaacaaacaagatgatgacatgtacgaggacatcattgaggaaacgcccaagaaaactaaactcaagaaggatacgaaaaaaaagctcaataaaaaaaaatctgtgaaggaattgcgatcctttgatatcgacacactaaatcaactgttgagtgtgacaaagggaaccttaatcgggtctgaatttgcgcaactggggatgaaaattgaggagaaacgtgccctggagagactagtagactctttgtccaggttaacagcagacatggttcttgatccggaccgctatgaagaaggactgaaaagattagacaaagctacaaaggctcttgaagggttttgatggtgcaacaacaataataatagtaatagtaacagtggtagtaacaataacaataacaatatcaatatcaatatcaataatatattataatactaataatgaataataataatagcaataagtatagtatagtatagtggtaat

SEQ ID NO: 2817 - DNA, 1845 bp, Saccharomyces cerevisiae
atcaatattagattaacaaaccaatcaaaatggaggactctaataatgaagccagcgatgacttcaacaacttattaaacaaagaaattgagtctgcaaaggaagtgaagttaagaaaattcgcgaacaggaataataataggaacgaaaacagttccaaagtcaaagatgcgagtggattcagactgagagttattcaaaccgatgggcacaaaactaaaaagacagaccctgattatgaagtgacaattgatggacccttaaggaagattgagccttattttttcacttataaaactttctgtaaggagaggtggagagatcgtaagttggtggatgtattcgtgagcgaattcagggatcgagagcccagctattattccaaaaccattgcagagggaaaagtatacttaaacgatgaacctgcaaaccttgataccatcattcgtgacggtgatctgatcacacataaagtacatcgacatgaaccgccagtcacatctaaaccaatagatattgtgtttgaagacgaagatatccttgtcattgataaacccagcagtattccagtgcacccaacgggcagatacagattcaataccattacaaaaatgctagaaagacagctaggttattcagtacatccatgtaatagactagacaagccaactagtggactaatgtttttagccaagactccattaggtgcagatagaatgggagaccaaatgaaagcgagggaagtcaccaaagaatacgtagcccgcgtgaagggcgagttccctataggtatagtagaggtagataagcctgtcagatctgttaaccctaaagttgcactaaacgctgtttgcgagatgagcgatgaaaacgctaaacatgccaagaccgttttccaaagggttagctatgatggacagacgagtattgtaaagtgtaaaccattgacaggtagaactcaccaaataagagtccatttgcagtacttgggatttcccatagcaaatgaccctatatactcgaacccagatatctggggtccagatttgggccgcggtggacttcaaaactatgatgacatcgttctgaaactagacgctattggcaagactaatcctgcagagagctggattcatcctcatagcgagggtgaatacttgcttggccgtcagtgcgaagaatgcgaggctgaaatgtacacagatcccggtactaatgatctcgacctctggctgcatgccttccggtacgagtcattggaaagaaattcggatacgcaaaaacctctctggagttatagaacaaaataccctgaatgggccttagagccacatcgccgatatatggaaatggccgttaaggaagctggtaagtgtggcccgacaaagactgcttttagtgttggtgccgttcttgttcatggaactcaagtacttgccacaggatattcaagagagctaccaggaaacactcatgcagaacagtgtgctttgataaagtactcgcagttacacccgaactgtcccactatagtccctatgggaacagtgctctatacaaccatggaaccctgttccttcaggctaagtggcaatgagccttgctgcgatagaatcctggccacccaaggtgccattggtactgtcttcgtgggggttatggagcccgatacatttgttaaaaacaatacaagtttgaacaagctggaatcgcacggtgtgaactacatacaaataccaggctacgaggaggagtgcaccatcattgccttcaaaggccacgataatagtgacgacaaagcttagactatttagcatatatattatcatgtaatcttacatcata

SEQ ID NO: 2818 - DNA, 1164 bp, Saccharomyces cerevisiae
acatcagcactttactatggcattggaaagagaattattggttgcaactcaagctgtacgaaaggcgtctttattgactaagagaattcaatctgaagtgatttctcacaaggactccactactattaccaagaatgataattctccagtaaccacaggtgattatgctgcacaaacgatcatcataaatgctatcaagagcaattttcctgatgataaggtagttggtgaagaatcctcatcaggattgagcgacgcattcgtctcaggaattttaaacgaaataaaagccaatgacgaagtttataacaagaattataaaaaggatgattttctgtttacaaacgatcagtttccgctaaaatctttggaggacgtcaggcaaatcatcgatttcggcaattacgaaggtggtagaaaaggaagattttggtgtttggatcctattgacggaaccaaggggtttttaagaggtgaacagtttgcagtatgtctggccttaattgtggacggtgttgttcagcttggttgtattggatgccccaacttagttttaagttcttatggggcccaagatttgaaaggccatgagtcatttggttatatctttcgtgctgttagaggtttaggtgccttctattctccatcttcagatgcagagtcatggaccaaaatccacgttagacacttaaaagacactaaagacatgattactttagagggagttgaaaagggacactcctctcatgatgaacaaactgctatcaaaaacaaactaaatatatccaaatctttgcacttggattctcaagccaagtactgtttgttagcattgggcttagcagacgtatatttacgtctgcctatcaaactttcttaccaagaaaagatctgggaccatgctgcaggcaacgttattgtccatgaagctggaggtatccatacagatgccatggaagatgttcctctagacttcggtaacggtagaacgctagctacgaagggagttatagcgtcaagtggcccacgcgagttacatgacttggtggtgtctacatcatgcgatgtcattcagtcaagaaacgcctaaataacatatattttactttattgatagacataaatatatgagtacatatatatatgtgtgtatgtgtatgtaca

SEQ ID NO: 2819 - DNA, 2940 bp, Saccharomyces cerevisiae
gtacttctaggcttgaaaatttggttttgaatataatgccccctcagattcccaatgaaaatgatgatctctttacaaggtggcttaagtctcgggccatcatacaaagggcagtatcgacaagagagtgctttgactcagaagtatttctggcgtctggtggctggaatataacgaatgagataataacgttaaagaaatattatcaactcaagtggccaaactccagttgcaattcgtttcatccaaaaaccgtggagtttattaaagaacgattacacaacctagaagaacatgactcttcatggaaaatcccaaatcctgcttactcattcaagaaagccttcttggaggatactaaatctgcattttccaacttagaacccgtctggggaccatcaaggcttttgaatccagctgaattactattgccacaggacgaaaaactacttgttcaagagataccactagagttcgcaccttttcaatacacaaataggtttgcttatggtggtttgcagttcaagaacaatttgttcgtcacttatgggagttattccttcctggctgccggtcaatgcgtcgaagttcataatttcgatatactattgaacgtttcgtcattagaaatatgtcacgccttattgcccgtgataataccagatgacggagatgtaagaaacttccgcaattcatcatatgtgaaatttaaggatacacagttcaacagcatacctgaactatgttctatcaactttatgaagatttgtaacttcatgcatcaagattttctactagcttgcggtgacaacggaatcgtttatatctgggaaatcaacaaagttattaagatatttaataaatttacttcggatatcttgggaggcaaagataacagccgggaaagatacataaatgttgatccatatatggtgttaagagtagaggaatcttgttggagtgttgatgtaatagatataaatggcatcatatatatcgctgttggccataacaagcctggagttacagtctttgcattcgataaagatgtaaagaaggaaagacggtacattcggcctctagatcttccctcatctcacaatgttccttgtgttaactttgttcctaattcaaaagattctgttggatatattacattaagttattgttctatatttgggaatgttgttaccgttaaattaaaggagcatgattgtaccattttaacgagtttccttgatactcaattttttggcgacgacttatggacaataactccactgactaagaaggattttgcgaaagttgacaatttcgaattgttgaatcttaactaccaagacggtttcaaagaaagcatgttatattctatttgccgagatgattttttacttgggtattactgtgataacgcctacctctctgggaatttcggtattggtacattactcaatcaatttcaggttcctgtcacagacctacgactgacttcttcagcagggatccccgatgaagttataccattaagatttacctcatttgatagaaattacactacaacgggctcgataaaatacgagtacagcagagaggattttgcacttattttacatgccggtgacttagacgatatgaatgatgcagtgacaaaaaacacctcatgtgaacagcatttacaccaatggacattttgggaggattctggttataaacattatcgtgctactgagcgtggattttcgaaatacaaggatattattaatacttttccacagttgataactcctagtggaagaaataaaacatcgcaatatcaaaacacttctgggagaaagatctgtgagccgtctacttataaacttactgatctcgaaaatgatattgaagatatatctcgcgaatttaatagaagtattcgtaatttgaaaatggataaacaaagacaactacgaacttcaaaagagttcaaatcgctaagttcagtaaatcatataccaaatattgaatcgggaaactttttatggtacaacaccgatgccgctgccgattggagaacactttttggcaaggatttgaacacggtcttgaaggacccagaaatttgtagccttcaactgaactctacagaagaggacgatgtcaatagcgaccctgaaaatgaagaatctggtagcagcttaacaagtttccagcgaagatatagggatactgaacagcgtgctcacttgaaatcagaatcgcagaaatcttgggggttccacaactatgtaagaaacgtcaagcggttattagagtcagcagtaccgggctcagaagattcgcctcttgggtatcaactatccgaaatgcacgacgagttcttcttcctaaccacagcccataggctggtgttgatgaaagcaaatccactcataattatatcagcaactcatcatgagatttttcccttagatggtgttgtgacgtgtgcttccaagtcgctgctccaagcactaaacagaataaattttgtgtgtcacatcaaagaactaaattgcatagccgtggcttcacaattgggtctcatttcattactaagactaacagagtacagaggcatctattcgtttagacaagagtatattcttggatgggaagtccaagaccctgttaaccctagtccagagtgcagatgtaacaggaacttgtttgacgcaccaatgtatggtgcagatggagagagctcggacacatactgcggcgtgtgcgacgtctatttccccatgggtgatatttgcggactagattacacttatgcatctgacagtgaagagttaaaacgtaagggatatgctaccttatacgtagcatcaagaggctccttgagggcattcaagatcacaactgagcatggaacaactcaacaatagcatattttgacatttacatagccatctatat

SEQ ID NO: 2820 - DNA, 1731 bp, Saccharomyces cerevisiae
tcatctcatccagcccttctcgctaatcgtagccatttattatttgatagaaaatttttttcaactgcggtcgaagggtaacagccatattttccttaattgattagtataggagaacttgatgataaagtgtggaaacctttcataaacggttggagaaaagaatcacatagagttatggtgagcaatgattagtggtgtgctggtatactcatcgagaggtgaacttgtcttgaacaagttcttcaagaactcgttgaagcggtccatatccgatatcttccgagtacaagtgatcaataatctagatgttagatcgcctgttttgacactgggctcaactactttccatcacatcaggtcgaggcatggtgacaatttgtggttggtaaccattacgagaagcaacgctaatagtgcggcgatctgggagttcttatataagcttgatgcagtgatgaatgcttatcgattggatagagaggaggccttgaaagaggaattcatgattgtgcatgagatgctggatataatgttgggtggaaatgggataccaattgacactgaattgaactctgttatagcgcagatgtctgtgaaacccgttagaaatatgggcggattgttagatagtcccgatggaaatgatgtattatcttcctcttcatctcctacttcttcagcaggagaactacattttcccaaatttttgacaaaaagaagcagtagtttcctgggtcaaggagactccacttctgatttctatgataacaataagatcacttggaggcccaaggggataatacacaagaaggatgaagttttcttgtatgtcaatgagaggataaacattctggtatctagggatggttctatcttgaaatcatacgttgatggcaccatagatatcaccacacacttgagtgggacccctatttgtagatttggattgaatgattctttgggaatgcagtccgaagacgagaagaaatggttagcacagcagcagcgtcactctggcagcgattttggaaacaagaacttcattcccaaagctgctgccggtagtgttttgttggaagattgcaagtttcacgaatgtgtctcacttgacaaatttaacagaaatcatatcattgaattcgtcccaccagacggttcgatggagttgatgaaatatcatgtacgagataacataaacctgccgttcaaggttacacctattgttacacattctacaagagataacgagattgattacaggataacattgaagtctttatttcctggaaaactttccgccaaagatgtggtactacatatacccgttccaccaagcactgtggattgtaagataagtgtctctaatggccactgtaagtttgtgccagaagaaaatgcaatgatttggaggttcaacaagtacaatgggttgacggaaaacactttaagtgcagttactgtgtccacaagtgatactactcaattgaatcttcaacaatggacaagacctccaatatccctggaattcgaggtcatgatgttcagtaattctggcttagtcgtacgatactttaccatttctggaaaagacagtaagcatcgtgctgtaaaatggattaaatatatatcgaaagccggttcttacgaggtgaggtactagcccgtaatttttgtgtacatatatttttatcagtcctgtattttttatagtaatttcctttagaagtc

SEQ ID NO: 2821 - DNA, 2478 bp, Saccharomyces cerevisiae
gcttgtttgcttattacataataaaaaaagagttgatatcgtcacagttacttgctgctgcgtctgttatttgcacgaaactctccccactataatagatatgtcgtttttgccactaaggtctaggtcacgatcaggcgctcctcattgggtatacatcatcttatatcacatctttacgataccgaagatatattcactgccgttgttatccggatcacacgtactcaattctagggatgttgccgattccggccatagcgtaggtgatgaggcaagcgttaccacgtactatattatctctatcatcctagtgctgctgggtggtgtatttgcaggattgacgctggggttgatgggtcaagatgaagtctacctgaaggtaatcagcacttcaggctcgaattctgaaaagaaactggccaagcgggtgcttgacctaatatctagggggaagcattgggttctagtcacactgctgctttctaatgttataaccaacgaaacattgcctattgttttggacaggtgtcttgggggtggttggcaggctgtagtgtcgtcaactattctaattgtgatcttcggtgaaattattccgcagagtgtctgtgttaaatacgggctgcaagttggggcattcttctgcccctttgttcttgtactgatgtatctgatgtacccagtcgcatatccgatcgcgactctcctggactatatgctgggtgaagatcatggtacgatgtacaaaaaatccggcttaaagactttggtcaccttgcataggaccatgggggtggaacggttgactaaagacgaagttacaatcatctctgctgttttggatctaaaggcaaagagggttgaggaaatcatgactccgattgaaaacgtgttcacaatgagtgccgataccatcctagacgataaaactgtcgaaaaaatcttcaactcagggttttctagaatcccgatttttttgcccaatgaaccaaacaacttcatcggcatgttacttgtcagggtgcttatctcctacgatcctgatgactgcctcccaatctcccacttccccctagccacgttgccagaaacttccccgaacacatcttgtttgaatattctgaattacttccaggaggggaaagctcacatgtgcgtcgttagtaaagagccgggctcctcgcatggcgctattggtgttttaactttggaggatgtcattgaagaattgatcggtgaagaaatcgtggacgagtctgatgtctttgtggacatgcatcagcatattatgagacaacaaccggggcccttgagcaaaaggcacattacttcctatttgcatcatttgtacactagctctcacaaggagcacaaagctgctgaccaagctgatgaatcgtctccactcttgtctccatccaattctaatcacccatccgagcacccacagcaagatttgaataataagtcttggaagcagaagtcaaatgatggttacgacaggtccaacgctgtattgtctccaactccacaagtgacggaacatggcaccatcataccttcaaatctagcgtccaacccgttgaacgtaaataaatcttttgttaccattaaaaagcctgccaatgttccgaaaatcattactacacacactcctcattctagcaaagagccttctccagcaccacactcaaatgataaatcactctccgccgaagaacaacaactattaagtgatcatgcagagctatctcgccaagctgttctccatactcaacggtcgggtcaaccaactcaagttactacctcgactaaaaccacgagaaatagccctgatagtatatcaattccaaattctggcgcgaatcacggcaacgaaaatcaaaacgttacaatctcaacctcttaccaaaatacgaagaatggtattgtggaatctgtcatcacagtcaaaggtgttccaaaaaccatcattggccccgcaaaagattgggacgaatccaaaagtgaatatggaaacgagaatatcaatcaagagaattctaatcgaagtgacgatagagaaagttcaagttcaaatgcaagtttattttccagtattaagaataaatttaagaacgaaaacgctaacaacaatgatcgttctaatttcaccgactctttgtcaagaacttccaattatgatgccaacggctcctcgtcgaccataaaaagatgaagagattatgccaaaagaattgcccatgcatcataataaccatcatcaccgttcttattagtcccagacgcatgaaatcacaggggagagcagcttaaaattttttctacagacatacaagaagaaattgcagtttttttttttttgtttctctaacctataaataaaatgtttcaatacacatactaaacaaagaaaaaaaaatgtagagaattttatacgcaaaatatatagacactttcccctatttttatcaa

SEQ ID NO: 2822 - DNA, 464 bp, Saccharomyces cerevisiae
caagcaagcacgctaatttaatatcgatttaaacatgaaagtatcacaagttttcatttctgccatctctgtcttcggcctcgctactagcgtaaatgctcaaaacgcatccaacaccacgagtaacgctgctcctgctttgcacgctcaaaatggtcaactactaaacgccggagtcgtcggtgctgctgttggtggtgctttggcctttttgatttaggaaaaacgccgcttactgccacgatgatgataccctattgacgtttctgaaatgtataatttcttttctcatcttcccctttgatattccatctataggccccagagtagtaaatttggtgctttaattttttttctcttcttccagttcgtctctattttttcattccattatatttatttatcagttttactttctcaaatattcttatataacactatttcatctacgtaaccgaaaataa

SEQ ID NO: 2823 - DNA, 1351 bp, Saccharomyces cerevisiae
ttatattttttaggttttcatatagtgtcttacgcaaataggcggaccatagaatgactgtcaccataaaagaattgactaaccacaactacattgaccacgaactatcagccactttagactcaacggatgcgttcgagggtcccgagaagttgctggaaatctggttcttccctcacaagaagtccatcacgaccgaaaagacattaagaaatattggcatggatagatggatcgagattttgaaattagtgaaatgcgaagttctttccatgaagaagactaaagaactggatgcctttttgttgagtgagtcttccctcttcgtcttcgatcacaaattgacgatgaagacgtgcggtactacaaccacattgttctgtctcgaaaagcttttccagatcgttgagcaagagttatcgtgggctttccgcacaacacaagggggcaagtacaaaccatttaaagtgttttattctagacgatgtttccttttcccctgtaagcaagccgctatccatcaaaactgggctgacgaagtcgactatttgaacaaatttttcgacaatggtaaaagttattccgtgggaagaaatgacaagagcaaccactggaacctgtacgtcaccgagacggaccgctccacacctaagggaaaggagtacatcgaggatgacgacgaaactttcgaagtactgatgacggagctggacccagaatgcgctagtaagtttgtttgcgggcctgaggcatccacaaccgctctcgtggagccaaacgaagataagggccacaacctcggctaccaaatgactaaaaatacaaggcttgacgaaatatatgtcaactcggcccaagactccgatttatcatttcaccacgatgcatttgcgttcacgccatgtggatactcatccaatatgattctcgctgaaaaatactattacaccctgcacgtgactccggaaaagggttggtcttacgcctctttcgaaagtaacatacccgtatttgacatttcccaagggaagcaagacaacttggacgttcttctacatattctgaacgtttttcaaccaagagagttctcgatgaccttttttaccaaaaattatcagaaccaatccttccaaaaactactaagcatcaacgagtcactgcccgactacatcaagttagacaaaattgtttatgatctggacgactaccaccttttctatatgaaattgcagaagaaaatatgaaaagccgccatttgtgtctcctcatacttacatagaatagccctcttctattatccttcgcttgctttctagcactcataactaatgtagtttaacccgcttgtata

SEQ ID NO: 2824 - DNA, 1144 bp, Saccharomyces cerevisiae
aaaaaggaaaaaaagggcaaggtatatccctgaggacccctggttggctgtaaagacaaactaaggatgaaagccggaattgagcttataagtcacagccaggcttctcacgccacatatgctaattctatgacccttgcagaaaaggggccacaacgtttaaaaagacaattcaaagaacacagttcttcaaaggaaagtaacgtaagtcgttggctaaagattttcataagacagtttgatatttggtttcctgaaacgataccaacaatgaaagtgagatacgaactgcttagaaaaaacttcattaaagaaattttcaactcaagagcatttatctacccattcttagggttttatgaagtgctgacgaatcctgtttattggaagcatattttactgtttgcggtttgctatgccctgatttttgtcactattgctggtctcttttatgtcacacttgtaccgcttttagtgacatgggccatactgttattagggcctcttggtgtgatactggttcatattcaatggattttacaaacgaatgtcttgactgcctttgtttgtagaacactggtcctgacccatattacgaatcagatatttgatatatctttggtgttgcaagaccaagatgaatttctaaacgaggtgaaggtattgcctaaaccacaaaagccacatagaaaaatcgatgaacctgatgcggtgagaaatttcaacacaataaagggaagtcggatttttaagattcccagattactattcagaatgttttttaaagtctccaattttacttcactaacattactgtcgctaattcctattgtaggaccaatcttggcaaatcaactaatggccccaaaaagaacctttacctatttgcagaggtactttttactaaagggattcagtaagaaacaggccaaagattttcagtacgagcattacgcaagtttcatatgtttcggtatgtctgccggtctactagagttaatacccttcttcacaatagtcaccatatctagcaacactgttggtgcagctaaatggtgtacttcgctactaaagggtgaaagaaagaaggaatgagcctaaaacagcaaatttatgtagaagtgtgattatatattccttaact

SEQ ID NO: 2825 - DNA, 1511 bp, Saccharomyces cerevisiae
cgacatatcatccaccagattatcacgctataaattttaaagtgaaaaatgtcctctgcaattgacaatctctttggtaacattgatgagaaaaaaatagaatcttcagtagataagctatttagttcatcctgtggacctattaataaattggaagtcaaaagcaaaacacgtactgtccttcctgattcgaagaaaagggaaagagctgccgaagctgatcaagaagaaaaagaagcaagcaaacctgatgtttcagatgagcaaactgaagaagttgcccttccaaaagtaaagaaggccaaaaaaagtaaaaggaatgacgaggatgaagacttagaagcccgctattatgcgaaactactaaatgaagaagctgaggctgaggatgataaaccaacagtaacgaaaactgatgaaacttcagtaccactgacatcagcagctaagaaagttgatttcaaagaagacgagttagaaaaggcagaaagaactgttttcattggtaacatcttaagtactgtcatcacatctaaaaaggtttataaagaattcaaaaaactttttggtacaaatccgatagcagaaactgaggaatctggtaatgaaaaagaagaggaaagttctaagaaaagtgacaataacgaatttgccattgaaagcataagattcagatctatttcctttgatgaagctcttcctagaaaagttgcgtttgtccaacaaaaatttcataagtcaagggatacaataaacgcttacatcgtctataagaataagtctgctgtaagaaaaatctgctcgaatttgaatgctgtcgttttccaagatcatcacttaagagttgattcagttgctcatccagctccgcatgataagaagcgttcaatctttgtaggtaacttggattttgaagaaatagaagaaagtctttggaaacattttgaaccatgtggcgatattgaatatgtccgtattatcagagattcaaagacaaatatgggtaagggatttgcttatgttcaatttaaagatttacaaagtgtaaacaaagcacttttattgaacgaaaagcctatgaagtcacaaaaacaagaagacgaaaatacaaagaaaccaactaaaaaggcaagaaaattgcgtgtttccagatgtaagaacatgaagaagggtactactattgggaccggcttggatagaaatgggttgacagattcacaaagaaccagagcaggtagagctaaaaagattttaggtaaggctgatagagccactttgggccaagagataactatcgaaggtttaagagcaaagaaaggcgaaggttccacccatctaaaaaagaagaaacaaagatccgctacaggtagggttaccaaaagatcgatagcattcaagaaagctcaagctgaaaagagcaagaaatagtttcattagttttcacacaatatcaattttgttagagatacactgtatattattactagttatttcttatctcttgtagcttc

SEQ ID NO: 2826 - DNA, 529 bp, Saccharomyces cerevisiae
tagaagtacacaacaagataatcacgaccgatcatgtctcaagctgttaatgccaagaagagagtttttaagacccactcttacagaggtgtcgatttggaaaaattgttggaaatgtccactgaagatttcgtcaagttggccccagctagagttagaagaagatttgcccgtggtatgacttccaagccagccggtttcatgaagaagttgagagctgccaagttggctgccccagaaaatgaaaagccagctccagtcagaacccacatgagaaacatgatcattgttccagaaatgatcggttccgtcgtcggtatctacaacggtaaggctttcaaccaagttgaaatcagaccagaaatgttgggtcactatttgggtgaattctccattacttacaccccagtcagacatggtagagccggtgctactacttcccgtttcatcccattgaaataagctccctaataacagaatcgcagtcatccttgtatcttttttatatataatgtctaggtattaggaa

SEQ ID NO: 2827 - DNA, 1352 bp, Saccharomyces cerevisiae
ctagttttcgcatcgctggaagttctcgatattgaatatcacttccaagaacgcaaacttagaatggtccggattcttcccataattttgagcgccctatcttcgaaattagtggcgagtacaatattgcattcatccatacactcagtgccatctggaggcgaaatcatatctgcagaagatcttaaagaacttgaaatttcagggaattcgatctgcgttgataatcgttgctatcctaagatatttgaaccaagacacgattggcagcccatactgccaggtcaagaactccccggtggtttggacattagaataaacatggacacaggtttaaaagaggcaaaactaaatgatgagaagaatgtcggtgataatggtagccatgagttaattgtatcttcagaagacatgaaagcatcgcctggtgactatgaattttccagtgatttcaaagaaatgagaaacatcatagattctaacccgactttatcttcacaggacattgccagattggaggatagttttgatagaataatggaatttgcgcatgattacaagcacggctacaaaattattacccatgaattcgccctcttggccaaccttagtctcaatgaaaatttgccgttaacattgagagagctcagtactagagtcattaccagctgcttgagaaacaatcctcctgtagtcgagttcattaatgaaagttttccaaattttaaaagcaaaatcatggccgctctgtcaaatttgaatgattctaaccacagatcctctaatatcctaataaaaagatacttgtccattttaaacgaattacctgtcacatccgaagatcttcctatatactctacggttgttttacaaaatgtatatgaaagaaacaacaaggacaaacagttacaaataaaagtcctggagttgatcagcaaaattttgaaggccgacatgtacgaaaatgacgatacaaatctaattttgttcaaaagaaatgctgagaattggtcgtcaaatctgcaagagtgggcaaacgagttccaagagatggtccagaacaaaagtatagatgaactacatacaagaacgttttttgacaccctttacaacttgaagaaaattttcaaaagtgacatcacgatcaacaaagggtttttgaattggttagcgcaacaatgtaaagccaggcaatctaacttggacaatgggctccaagagagagatactgaacaagactcatttgataagaaacttatcgacagcagacacttgatctttggcaaccccatggctcatagaataaaaaatttcagagatgaactctgatttcactgtcattgcatatatag

SEQ ID NO: 2828 - DNA, 1925 bp, Saccharomyces cerevisiae
cataatatacgctatctctatcactacagataatatactaagatgttgaatttcgcatcaagagcgtcatgtgtgacaagacgtcaagcaagcttgtattttgttaaaaatcaaggccctagattaatagcttccactattccctcgtgtcattggcctttgagagcgcaaggagtacagcccaactatcctttatctttgagattttattctactgataagtcgaaaagtgttacgaagcccgtagctccaacatccaccgatgctcctgccaagcccaaggagacgcttatggtcaaagtgaagcacgccttgaaacattatgctaatgggacgaaacttttgggttacgaaatcaaagtttctactaagcttttgattaaatttgctcagggttacgagttgtctagaagagagaggaaccaattgaggaggacaatgggcgatgtgtttaggttgatccctttttcagcgttccttattattccattcgccgaactatttttgcctttcgctttgaaactcttccccaacttactaccctccacttacgaatccggcaaggataagcaagccaagagaaataagctcatcgagatcagaaaaaagacatccgaattcttgcatgagactttggaagaatccaatttgatcacttacaacaccattgaaaatgcagagaagaagcaaaaatttttgaattttttccggaagctttattctgccaaggaaggtaagattatgactttccaacacgatgaaataagcgccattgcgcaaatgttcaaaaacgatagcgttttggataacttgtcaagaccacaattggcagcaatgtcgaagtttatgtcactaaggccatttggtaacgataacatgcttcgttaccaaattcgttccaaactaaaggatataatgaacgacgataaaactattgactacgaaggcgttgaaagtttatcgcaagaagagctgtatcaagcttgtgtgtctcgtggtatgaaagcgtacggtgtatccaaggaggacttggtcgataatctaaaagtttggctagaattgagactgagacaaaaaatcccatccgtcttgatggttttgagttccacgttcacgtttggaggacttccaaaggagaactattcaaaggcattctcgccactagctgaaaaaaaagaaacaaaaagcaaatatgacgaccttttggatctgtactacgacggtatattacaagtgctaagttccattccagatcccgtttacaacgtcgcaaaactagatgtatctgaatcgaaatcatccgctgctgaaactgaagctgaaaagcaagttgctgaaaagaagataaagacggaagaaaaacccgaggaaactgctataccgaaggaagaagccaccgcaaaagagtctgttatagctaccaccgcttctgcggttactcctaaactagtcgtagttaatgaaaaggcagaaacagcgaagacagaggaaatatctcaggaaaaagagaacgcagagcctaccgactctgcggaagccacggaagctgaagaaaagaagacatccgacgataacgagttcaaattgaacgttttgaaggagcaagaagaactaataaagaaggaggaagaggaagctaagcaaagagcttcgagagagcatgtgccagatgatatcaacctagatgaagaggaagaagcaaaatctgtacctcccattccggccgatcaagctgcgaagacttttgtcattaagaaagattgatattagatcaaagcctaagaaaaaaactaaaaaaaactaaaaaaaaaaagtcaatcggttctcttttctctgacaacaatggcaaaagatcaaagagaagcgtacgtcacggcaaaaccagcgacccttcaaaactaaattattatgcatgtatataatag

SEQ ID NO: 2829 - DNA, 432 bp, Saccharomyces cerevisiae
acgaaactgccacaagacagaaatatgacagaggttgtgggattctgggagagcgtgtcagatgacgaatcagaagacaaagactgtatggaggtgcagaacacagtgagtgccgacgagagcccacttgtgcagagccttgtatcctttgtaggctcgtgctccatcaacctacttttgcccttcctcaacggcatgatgctcggcttcggcgagctatttgctcacgagctctgctggagattcaattggtttaaccatagaaacaaggggtataaggtgtacccagagtcgcgcaaaatagcagcattgaaagagatttcaagccctggcacccgtgggagggttgcgtccaagttcctttaaacgatcaccaaagcattagcaacctacataaataaatacacacacacatacggtagattatacgta

SEQ ID NO: 2830 - DNA, 1330 bp, Saccharomyces cerevisiae
tcaattatccactatctcatgtccaaaatagaagagctaccaccatcagatactgatgaccattcgtattctagtaaaccgggagatgtatttttagcatttgtggacgcacctgttaaagagactgatgacatattagttgaagatagctttattggcggtgaacctaagtggctacatccggattccgaaccacctgctgaactattgaaatgtggtgcttgtaaatcagcggataatatgaagctgttactacaagctttttcgcccttagatgatgagcagatgagtgccatacaacaacgtcttggtatcaataatatgagctatattaatccccaggatgacagagtattatatgtcttcctgtgtaccgaatgtcaaaggaagggcaattctgttcgctgtatcagaggagtaaagaagaataaaaacgttgatagcctttccgaaaaaatggcttcaacttcattggaaaaagacttccaaatcaatccctttgacttgtcgaataattcagattctaaatgtaatgctttttcaagcaacccatttggcggtgcaaatgctaacccttttggagctgatagcattaattccaatatatcacaaagcaaggacgaaggcaaaaagaaggaatctgctaccgtttctgcaaagacggcgagaaaactacatgatttacaaaaggacaaagaatacgatggcaataaatgctttaaaagttgtttgttgtacgttgaagaggaaaccttcaaaaataaaaagccagctcatctgcagctgccaaaaaatttaaaaattgataaggaggcactagatttaacaggagatgaggatctcgaaaaagatccgatcaaattggacccgaggacagaaaaattatccaagtttcttgatgacgacacattccaaaaattccaagaagtggttggttacaacccgcttcaagtattacgttatgacttaggcggaaaacctttgctatatgccgaaacaaaagtcgatattttaagcactgtgccaagaccgggctacaacccatcgagccaaagaatctttgaaatgcagttaatgccaaagatgatttttgatctggaagaagtagtgtctgtcgataacggtatggaatggggtaccattcttgttttcactgatgttgaaaattacatgcctgaatttgatgaacatggtgtcggttatgtagaagaatgtgtcaaagttcagtgggaatcgagaacgtgaatagtgggtaatttgtctttcatgaatttttgataattaaatagtttacagtatttacatagattatatacgtatttttacatat

SEQ ID NO: 2831 - DNA, 3125 bp, Saccharomyces cerevisiae
catacttgcatcatacaggccaaaacaacatgtcagttcccgctatcgcccccagacggaagagacttgcagatggtttaagcgtcactcagaaggtgtttgtaaggtctcgtaatggaggcgctaccaagatcgtaagagaacactatttaagatcggacatcccatgtctttcgagaagttgtaccaagtgtccgcaaattgtcgtccccgatgctcaaaatgagttgccgaagttcatcttgtcagattctcccttagaattaagcgcacccattggtaagcattacgtcgtcttggataccaacgtggtgttacaggcaattgaccttttagagaatccgaattgttttttcgacgtcattgtcccccagattgtcctagatgaagtgagaaacaagtcatatccggtgtacacgagattaagaactctatgcagagatagtgacgatcataagagattcatcgtgtttcataacgaatttagtgaacatacttttgtggaaaggcttccaaatgaaacgattaatgacagaaacgacagggctataaggaaaacctgtcaatggtatagtgagcacttgaaaccttatgacataaacgtcgttcttgttaccaacgatcgtttgaatagagaagctgccactaaggaagtggagtccaatataataaccaagagcttggtacagtatatcgagttactaccaaatgcagacgacatcagagactctattcctcaaatggattcttttgataaagatcttgaaagggacacattttcagatttcacgttcccggagtactattctacagcaagagtaatgggtggtttgaaaaatggcgttttgtaccagggcaatattcaaatatcagagtacaactttctagaaggttcagtgagtttaccaagattttccaaaccagtgttaattgttgggcagaaaaacctaaatagagcattcaacggtgaccaggttatcgtggaactgctacctcaatcagaatggaaggcaccctcatccattgtcttggattctgaacatttcgacgttaacgataaccccgatattgaggctggcgatgacgatgacaataatgagtcctcttccaataccaccgtgatttccgacaagcagcgcaggctgcttgctaaagatgctatgatagctcaaagatcgaaaaaaattcagcccacggcaaaagttgtatatatacaaagaagatcctggagacagtacgtcggtcaactagcaccaagttctgttgatccacaaagcagtagtacacagaatgtcttcgttattttgatggacaaatgtcttccaaaagtcagaatcagaacaaggcgtgctgctgaattattggataagaggattgtcatttccattgattcgtggcccaccactcataaatacccattaggtcactttgtgagagacctcggtacaattgaatctgctcaagctgaaacagaggccttattgttggagcatgatgttgaatataggcctttttccaagaaagttctagaatgtttgcccgcagaaggccacgattggaaggccccaacaaaactggacgatcctgaggctgtttcaaaggatccattattgacaaaaagaaaggatctcagagataaacttatatgtagtatcgatcctccaggatgtgttgatattgacgatgccctacatgcgaaaaagcttccaaacggtaattgggaagttggtgttcatattgctgatgttactcacttcgttaaaccgggcactgccctggatgcggaaggtgctgcaagaggtacttctgtatatttggtagacaaacgtattgacatgctgcccatgcttctaggtaccgacctgtgttctctaaaaccatacgttgatagattcgcattctctgtcatttgggaattggatgatagtgctaatattgtaaatgttaattttatgaaatccgtcatcagatctagagaagctttctcatacgaacaagcacaactgagaattgatgacaaaacccaaaatgatgaattaacgatgggtatgagggctctcttgaaattgtctgtaaaactgaagcaaaagagactagaggcaggtgccttgaacttagcttctcctgaggttaaggtccatatggatagtgagacttcagatccaaatgaagtggaaatcaaaaaattactggcgacaaattctttagttgaagaatttatgttgttggctaatatatcagtggcaaggaagatatacgatgccttccctcaaacggcgatgctaagaagacacgcagctccgccatctaccaattttgaaatcttaaatgaaatgttaaacacaagaaagaatatgtcaatttcgttggaatcgtccaaggccttggccgattctttagacaggtgtgtggatcccgaagatccatattttaatacattggttcgtatcatgtcgactcgctgtatgatggcagcccaatacttttattctggagcttattcttatcctgactttagacactatggtttagccgttgatatctacacacatttcacatcacctattagacgttactgtgatgttgtggcccatagacaattagcaggtgccattgggtatgaacccctaagtttgactcatcgtgataagaataaaatggacatgatttgcagaaatatcaacagaaagcacagaaacgcccaattcgccggtagggcaagcatagaatactatgtcgggcaagtaatgaggaataacgagtccacagaaactggatatgttattaaggtatttaataatggtatagtcgtactggttcccaagtttggcgtggaaggcttgataagactggataatttgactgaggatcctaactcagccgcttttgatgaggtggaatacaaattaacctttgtgcctacaaattcagataaaccgagggatgtttacgttttcgataaggtcgaagttcaagttaggtcggtgatggatccaattactagcaagcgtaaggcagaattattgttaaaatagatggaagatgcttcagtatcaggatataaaaacgaaaaggaattcataactcatatataaaacacatcgtaaagtagtcaatgtataata

SEQ ID NO: 2832 - DNA, 1933 bp, Saccharomyces cerevisiae
aaaaaaaaaacccccctaccatttctaataacagcttcaccactagttatactgtcgactttctaccgatttgttggttcctttttataaccagaaaatcatctatcaattgcaatttgtaagagaaggggagaaagacaaaataataatatggtgccagaaaatagaaggaaacagttggcaatttttgtagttgtcacatatttgctcacattttattgcgtgtattcagccaccaagacaagcgtttcctttttgcaagtaacactgaagctaaatgaaggcttcaatctaatggttttgtcgatattcatcttattaaattctaccttactatggcaactcctaacgaaactattatttggtgaactgaggcttattgagcatgagcacatttttgaaaggttaccatttaccattataaacaccttgtttatgtcctcactgttccacgaacggtattttttcacagtggcattttttggactattactactctatctgaaagttttccattggattttaaaggataggctggaggccttattacagtcaataaatgattccaccacaatgaaaacccttatctttagtagattctcatttaacctcgtactattggcggttgtagactaccagataataacacgatgcatctcctccatatatacaaaccaaaagagtgatattgaatccacatccctttacctgatacaagtaatggagtttaccatgcttttgattgatttgctaaatttattcctacagacttgtttgaatttctgggaattttatcgctcacaacaaagtctgtctaatgagaacaaccatattgtccatggcgatcctacagatgaaaacacggttgagtctgatcaatctcagccagtgctgaatgacgacgacgatgacgacgatgatgatagacaatttaccggcctggagggtaaattcatgtatgaaaaagcaattgacgtattcacaagattcttaaaaacggcacttcatttgtctatgctaataccatttaggatgcctatgatgcttttgaaagatgtggtgtgggatatcttggcactatatcaaagtggcacaagtttgtggaaaatctggagaaataacaaacagctcgacgacactcttgtcactgtcaccgtagaacagctacaaaattctgcaaatgatgacaatatttgtatcatttgtatggatgagttaatacattctccaaaccagcagacgtggaagaataaaaacaagaaacccaaaaggttaccttgtggccacatacttcatttgtcgtgtttaaagaattggatggaacgttctcagacttgtcctatttgtagattgcctgtctttgatgaaaaaggtaatgttgtgcaaacgactttcacttccaatagtgatatcacgacacagaccaccgtaacagatagcactgggatagcgacagatcaacaaggtttcgcaaacgaagtagatctacttcccacaagaacaacttcccctgatataaggatagtgcctactcaaaatatagacacattagcaatgagaacaaggtcaacctctacaccatctcctacgtggtatacgttcccattacataaaactggtgataattctgttgggtcaagccgatcagcctacgaatttttgatcacaaattcagatgagaaagaaaatggtattcctgtcaaattaacaatagaaaatcacgaagtaaattctctgcatggagacgggggcgagcaaattgccaagaaaattgtcataccagataaatttatccagcatatctagattgcatgttttatattatacatagttttttttaaagaaaaaaactactggatgaaaaacacacacacacacacatatatatatattatacatcagcggaaattactcgatatctagaaatgcgtac

SEQ ID NO: 2833 - DNA, 635 bp, Saccharomyces cerevisiae
ctaaaaaacactgcggactctattatacttcagtcggaaaaaatatcgttaaattcaatttcgcactatagccgcacgtaaaaataacttaacataatgtcaggaaaagctcatggaggtaaaggtaaatccggcgctaaagacagtggttcattgagatctcaatcttcttcagcaagggctggcttgcagtttcctgtcggtaggattaagcgttacctgaaaaggcacgctaccggccgaacaagagtaggatccaaagctgccatttatttgactgctgtgttggaatatttgactgctgaagtgctggagttggctggtaatgcagccaaggatcttaaagtcaagaggattaccccaagacatctgcaattggccattagaggtgacgatgagttagattctttgatcagggctacaattgcttcaggtggtgttttgcctcatataaataaagcattattattgaaagtggaaaaaaagggaagtaagaaataagaagaatagtttttctttcccatttcccgtaattctccctgctcctgtatcctcattctatccatattaacgtctgtatcattattataagttgaaatttgtctctccgtacccgagttatatacatacatata

SEQ ID NO: 2834 - DNA, 1428 bp, Saccharomyces cerevisiae
gtgaaacaggaaagtctttaactattaatagggaaaagattgtcaacataaactagtaacgacacaatgagactgccagaaatctccatttggaaagtgatactactacttcatttgtttgctctacaagaatttcaacttgtctccgctgcaaatttgccctctttatcaagtagtacaaaggcagcagatagttctagtaaaggcagctcttcagccaagacaaccacgtccttaggcaaaagctcagtaaccagtaaggatgtttcgtcaagtcataatgtcacttcaagcactaaaatgcccaaaatcaccacgagcgctagtacaagcttatacaccaactctagtttatggagcaacaacagtgtaatatcaacttcatctattacaccttccagcgtttatatcccggttacggacggaaataaattcttatatcaggctcatcatcctaacggtactgtgttcattgcatttgctggctgtttaggtgcaattctactatcactgacgggtgcatggattgcattgaatataaagtcatggcgaagtgctagaaaggaaaataagctgagaaatctagaaaatcaataccaacacgatcctttctacttccaaacaaacattaatgacgacgaaagtgaaacatcttcccattctgacgacagtgacatatcagaaaaagttctgaaaaataactcatctcgtatgagtttgtatactctaggatccacttctgttttgaatcttttgaacaataaaacagatgccaacgataacttcagatcatctatgtttatttcacccaccgaaattctgcaatctgatgccaacaactctaatacatggtctcaaagcaatgagagtgctatatatgattccttgtccagtactccaagggaacctggtgctacccaaatactgggaaagtttacagacagcactaatccattcaattatacatcatacaatttaagtcccgactctgaagaccgctctactccaaaatcaaatgttagtcagggtaaagtaaagaagtaccgtcctcccagtgttcatctggatcaactgctcgacggtaaggaataattgcgtccccacctttctacacctcatttacactaagtgcgactcgaaaacctaatacttcaattaatgagaggatacgtgtaaattcctcgccatcaccatgcgctgtttttagtacaccattcttttttcgcatacagatacaagcactaaactgatcgtactttgccaatgaataaaatggtgcatctgcgtatcaacttgttgattgcgacggaagaccaggaaattttgcagcaaaatatatttgtttgtatcctccgcccctactggagcttgttagaaagcttaaatactataaacataactatacagaaaaatcttgttctatagtct

SEQ ID NO: 2835 - DNA, 416 bp, Saccharomyces cerevisiae
ccagatacatttggacacaactgcatcatgaatgctccagacagattcgaactgttccttctgggtgaaggggaatccaagctaaagattgaccccgacaccaaagcccccaacgcagtagtgataacgtttgagaaggaggaccacacgttgggaaacctgattcgtgcagaacttctgaacgacagaaaagtgctgtttgccgcttacaaggttgagcatcccttcttcgctcgtttcaagctgagaatacagaccaccgagggctacgacccgaaggatgccttgaaaaacgcctgtaacagcatcattaacaagcttggcgccctgaagacaaatttcgaaaccgagtggaacctgcaaactctagccgccgacgacgcattttgatatataggagtttaatactatagcca

SEQ ID NO: 2836 - DNA, 1262 bp, Saccharomyces cerevisiae
catgaattttaaaaactgagttgatcgttaaaccatgccagtaaagttaaggtggccttggttaggaattgctataccaacgtttctgatttcatttataggctatggtgcacactactttattttatccaatttcttgtcagttccgaaacaaataacatttgagttctgtttgtcaatgatatggctctcctattacttggccatctgcacaaatccaggaaggcctttgcccaactacaaaccaccccctgatatctggcggaatttctgtaagaagtgccaaagttataagccagaacgttcacatcattgtaaaacctgcaatcaatgcgtcctaatgatggatcatcattgtccgtggacgatgaattgcgtcggctttgcaaactatccgcatttccttagattcttattttggatcatagtgacgactagtgttttattttgcatacaagctaagcggatatattttatttggcaacaaaggcacttgcctggctacttcttcaaaaaatcagaactgattttcttaacaatatcgagtcctttaaattcttttgtcctactaacgataacaattcttttcctacgatgtttattcaatcaaatcttgaatggaagatctcaaattgagtcgtgggatatggatcggctagaatctttgttcaactccggaagattaactcagaaattaattgataatacttggagaatatatccagagtcgaggtcgtttcaaaataaaaaggatgctgaggaacacttgacaaaaaaaaggccacgttttgatgaacttgtaaatttcccttacgattttgatttgtacactaatgcattactgtaccttggtcccattcatttatggttatggccatatggtgttcctacgggagatgggaacaattttccaaaaaacggtatttcaaaatatgaggctaactcctcattggaagaccacatcctttcacttccctggccaccagatggaggtaaaacaaacaccgtcttcaatcatggcagctcaacaatagagatgcgtaatgaaagtggcgaacagctaataaggaccagacttcctcaaaatggcagacatgcttctcgtgagaagtggtacaacgactggggtgaatcactagacgattttggagtggatgttgatatggaatagaatactcattcatgggaatatcaagtatatgtatgtataaactgtcccttataaatagtgtcctttcgattacatactatgctaatgacgt

SEQ ID NO: 2837 - DNA, 1050 bp, Saccharomyces cerevisiae
ctaaatttcccgtcgttttaattatgctgcatgttggagaagaatcattccaaatgtcaactttattagaaaggactaagagtgtgcaagagctgaagaagagagctgcagggaaaacatccgcaaatcccgcagaggtcgctaaagctaaaaaagtactaagaaggctatatagttgggatgaaattccggaatggcaaagagacaatgattttattttacatggatacgtgaaagaaactagtagcttcattgaaacttttaaaagtttgttttatttgcataatgaaagtgtcaatatttattcacatttaattcctgctctcgggttcttcactgtactgttgctagataaatctactatcaaagtgtttgcaacaactacatggctagatcatatggtaatcgacctcttttattcgggggcgtttgcatgtttaatattgagtagctcctttcattgtctaaagagtcactccttaagaattgctaccttaggaaataagttggactaccttggtatttgtatattgattgttacgtcaatggtcagtattttgtactacggctattttgagaaattttccctattttgcctatttgcgcttattaccgttagctttgggatcgcgtgtagtattgtgtcactaaaagataagtttcggaaaagagagtggagaccttacagagctgggctatttgtttgttttggtttatcctcaattattccaatattcagcggcctttactgctatagtttttcagaaatttggacccaaattcagctcttttgggtattacttgggggtgtcctatatataattggcgctgttctttatggaatgcggtttcctgaaaagatttgccccggtaaatttgatatttggggtcattctcaccaacttttccattttctagttgttattgcggcattgtgccacttgagaggtttattaaatagttatgagttagtccatataaagatggagaacgggattgtctcctagatatttggaaaaaacgtaggatttatatagaaagtagttttaa

SEQ ID NO: 2838 - DNA, 74 bp, Saccharomyces cerevisiae
ggtttcgtggtctagtcggttatggcatctgcttaacacgcagaacgtccccagttcgatcctgggcgaaatcg

SEQ ID NO: 2839 - DNA, 73 bp, Saccharomyces cerevisiae; identical to SEQ ID NO: 78

SEQ ID NO: 2840 - DNA, 187 bp, Saccharomyces cerevisiae
gggaatataatactaaatactctgttatatagaactttctacgccttttcctctatggctatgaaagcgtggacaacggagacaaatagaccaattactgaatatggcttttgacatatcttcttcttcatgggtgaggattaagctgatatcctgacccacctatcattagtccttcagacatact

SEQ ID NO: 2841 - DNA, 96 bp, Saccharomyces cerevisiae
ctttatgatgatattctttacgaacttttagacgttagacttctgaaggagattagaccctcctatggaagagaaactcgttaaacttatctgagt

SEQ ID NO: 2842 - DNA, 225 bp, Saccharomyces cerevisiae
gaagcaaaattacaccatgagttcctattaacgtcagcctcttttgtactcataatgtggcttcggatgtttgatgggcgttgcttcagtgcgtacggctcatggtagattaattattagaaagatgtatctccagctgttgatattagagggggaagcctttctctttcacctcgcctttttaaacacctgatacagttggtcatgattcgttctacattttaa

SEQ ID NO: 2843 - DNA, 333 bp, Saccharomyces cerevisiae
gtcgacgtacttcataggatcatttctataggaatcgtcactctttgactcttcaaaagagccactgaatccaacttggttgatgagtcccataacctttgtaccccagagtgagaaaccgaaattgaatctaaattagcttggtccgcaatccttagcggttcggccatctataattttgaataaaaattttgctttgccgttgcatttgtagttttttcctttggaagtaattacaatattttatggcgcgatgatcttgacccatcctatgtacttcttttttgaagggatagggctctatgggtgggtacaaatggcagtctgacaagt

SEQ ID NO: 2844 - DNA, 90 bp, Saccharomyces cerevisiae
ttagaatgatgaaagaggtagcaatttgcagcagatttttcgtgattgaatcaaacaaagattaacctttacagaaccgctacactgata

SEQ ID NO: 2845 - DNA, 190 bp, Saccharomyces cerevisiae
atgatacatattaaacatgccttctattcactgtgccatcttacatccgtaggtgatcagaggggaaaagaagagctagagcaactcccacactcatgagcgtcctcatactgttctgggcgcttctcacaggtgcttcttttagtgtctcccattggcccagatcggtagctgcgcgagtgagatatct

SEQ ID NO: 2846 - DNA, 201 bp, Saccharomyces cerevisiae
aggttagggactgcaaaagaagcggcgaggcagcccacatcaagtggaactacacagacttccttgtcgcgatactacggtcccaagagcaatcctaacaagcaattacatattcccccgctgaacctgtacagtccacggatggtgcagaagttatatgatttgggggaagacgctttttcacatcttcttgcatgataa

SEQ ID NO: 2847 - DNA, 72 bp, Saccharomyces cerevisiae; identical to SEQ ID NO: 229

SEQ ID NO: 2848 - DNA, 74 bp, Saccharomyces cerevisiae; identical to SEQ ID NO: 401

SEQ ID NO: 2849 - DNA, 74 bp, Saccharomyces cerevisiae; identical to SEQ ID NO: 401

SEQ ID NO: 2850 - DNA, 82 bp, Saccharomyces cerevisiae; identical to SEQ ID NO: 1008

SEQ ID NO: 2851 - DNA, 1480 bp, Saccharomyces cerevisiae
tctcttcttcatttgatgaataaaggattcaaacttcagaaagttattcagcgtatattggctttcctttaatctaatgccccaagccatcataaatagccatattactttgaaagtgctcatccgtatacactgcaacttttcttcttttctctttagccgattatagctcctacctgttttttttttcttcttaagattatttatattccaattttatcatccgtattgtttccaatagcgttccagtgatcagttatatacttcgagaggcagataacctttctttttataagtgtttatcaaatttaagtctgcaagctatcataagacgaggatatcctttggagactcatagaaatcatggaaagcacatcaggagaacgttccgaaaatatacatgaggatcaagggataccaaaagtaattctgcccgctgattttaataaatgctctagaactgacctagtggtgctcatatcacgaatgttagtatcgctgatagcaatcaatgaaaattcagcaacaaagaaatctgatgaccaaattactttaacacgataccattctaagattcctccaaacatatcaatcttcaactatttcatacgactgacaaagttttcctctttagaacattgtgtgcttatgacatcactctattatatcgatttattgcaaactgtgtatcctgattttacgcttaattcgttgactgcccataggtttttattaacagccaccacagtcgcaacaaaaggcttatgtgattcgttctcaacaaacgcccattatgcaaaagttggaggagtacgatgtcacgaattgaatatactggagaacgattttttaaagagagtaaactacagaatcattccgcgggatcataacattacgttatgtagtatagagcaaaaacagaaaaagtttgtcatagataaaaacgcattagggtctctcgatttggattcttattcttacgttaatcgtccaaaaagtggatataatgttctagataaatactatcgaagaatagttcagctggtgggttcctttaacgcttcacctgataagagtagaaaggttgattatgttctcccgccaaatattgatatagtgagtgaaagtggctcccaaactactcaactaaaggggtcgtcatcacccaattctcactcttcacaaaagcgatattctgaggcaaaggacgcacatatctataacaagcgatcaaagccagattaatgatttttcgtggggtattatgaaagcaatcatgattgagcaaaattaaaactttccatttgtacatatatatatatatatatatatatatctgtgtgtgtataataagcaattggccatcatttggctaaaaagttcaagatttcaggtagtatataagagaataacttccctcttttgctaaagaaggatatgttctatttcagcctttttgcatcataagagcataagcgac

SEQ ID NO: 2852 - DNA, 4932 bp, Saccharomyces cerevisiae
ccagcattgctaatattcgaggcaccgtacctaactaatcagctcattcacgtaccacatattctttgttacttccctccctccacaacaggctacgctattgaccgctttcagtatagtctctttacccttttgttgtgttcgtttgaggttatttggaaaaggacaaaatatctaagaaacaagttatacattgtacaaaaatgtcacaggtttggcataattcgaattcgcaatcaaacgatgtggctacttcaaatgacgctacgggttccaacgaaagaaacgaaaaagaaccgtccctccagggaaataagcccggttttgttcaacagcagcaacggattactttaccctcgctatctgccttgagtactaaggaggaagatagaagagattccaatggccaacaggctctaacttctcatgctgctcacatattaggttatcctcccccacattcaaatgctatgccctcaattgcaactgattcagcattgaaacagccccacgagtatcaccctcgccctaaatcttcgtcctcttctccctctataaacgcttcgcttatgaatgctggtccagctcccctccccacagtgggagccgccagtttttctttgtcgagatttgacaatccattaccgataaaagctcctgttcatacagaggaaccaaaaagttataatggtcttcaggaagaagaaaaggcgacgcaacggcctcaagattgcaaggaagttcccgctggtgtgcagcctgctgatgcccctgaccctagcagcaaccatgcagatgctaacgatgacaataataacaacgaaaattctcacgatgaagatgctgactacagacctctaaacgtgaaggatgccctatcttacctcgaacaggtcaaatttcaatttagttcgcgtccggatatctataatttatttttagatattatgaaggactttaaatctcaggcaatagacacaccgggcgttattgaaagagtatccactttgttcagaggttatccaattttgattcaagggttcaatacttttctaccccaaggctatagaatcgaatgctcctctaatccggacgaccccattagagttactacaccaatgggtactacgacagtaaacaataacatcagtccatctggtagaggtacaacggatgcacaggaacttggttcttttccagaaagcgatggaaatggtgttcaacagccctccaatgtgccaatggtgccttcgagtgtgtatcaatcggaacaaaaccaagaccaacaacaatctttgcctcttttagctacttcttctggtttaccttcaattcaacaacctgaaatgcctgcacatcgccaaatcccacaaagtcaatctttagtgcctcaagaagatgctaagaaaaacgttgatgtcgaatttagtcaagccataagctacgttaataaaattaaaactagatttgccgaccaacctgatatttacaagcattttctggaaatactacaaacttatcagcgagagcaaaagccaataaacgaagtctacgcacaagtgacgcatcttttccaaaatgctcctgatttactagaagatttcaagaaattcttgccggactcttcagcttctgccaatcagcaggtgcaacatgctcagcaacatgctcaacaacaacatgaggcccaaatgcatgcacaggcacaagctcaggctcaggcacaggcacaggtggaacaacagaagcagcaacagcaattcttgtatccagcttcgggctattacggccatccttctaaccgaggtattccacagcaaaacttgcctcctataggaagcttctcgcctccaacaaacggttcgaccgtacatgaagcctatcaggatcaacagcacatgcaaccaccccacttcatgcccttaccatcgatcgttcaacacgggccaaatatggtacatcaagggatagcgaatgaaaatccacctctatcagatctaagaacgtctctcactgaacagtacgctccttctagtatacaacatcagcagcagcacccgcaaagtattagtcctatagcaaatacgcagtatggtgatatccctgttagaccggaaattgatttagatcctagcattgtgcctgtggtccctgaacccactgagcccatcgaaaacaatatatcgcttaatgaggaagtcactttcttcgaaaaggccaagaggtatatcggcaataaacatttatacactgagtttttgaaaattttaaatttgtactctcaagatatacttgatcttgacgatttagtggaaaaggtagatttctacttgggttccaataaagaactatttacgtggttcaaaaactttgttggctaccaagaaaaaaccaaatgtatcgagaatattgttcatgaaaaacatagattggatttagatttatgtgaggcatttggcccaagttacaagaggctaccaaaaagtgacactttcatgccatgctcaggtagggatgatatgtgttgggaagtcttgaacgatgaatgggttggacatcctgtatgggcttccgaagattcgggatttattgctcatcgtaaaaaccagtatgaggaaacactattcaagatcgaagaggaaagacatgagtatgatttttacattgaatcaaatttaagaactattcaatgtttggaaacaattgtaaataagatcgagaacatgactgagaatgaaaaagccaattttaaactgcctccaggtcttggccatacttcaatgactatttataaaaaagtgataaggaaagtttatgataaggaaagggggttcgagattattgatgctttgcatgagcaccctgcagtgacagccccagtcgttctgaaaaggttaaagcaaaaagacgaagaatggagaagagctcaacgtgaatggaataaagtttggagggagttagaacagaaggtttttttcaagtcattagatcatttaggcttaacatttaaacaggctgacaagaaattattaactacaaagcagttgatatcagagattagcagcatcaaagttgatcaaacaaacaaaaaaattcactggttaactcctaaaccaaagagccagttagattttgatttccctgataaaaacattttctatgatatcttgtgtttggctgacacttttataacccataccacagcctattctaatcccgataaagaaagattgaaagatttactaaaatacttcatctctttgtttttttctatttctttcgaaaaaatcgaagaatcgttgtactcccataagcaaaacgtgtcagaatctagcggatctgacgatggcagttctattgcatcaaggaagaggccctatcaacaagaaatgagtttacttgatattttacacaggagcagatatcaaaagctaaagcgttctaatgatgaagatggcaaagttccccagctctctgaaccacccgaagaagaacctaataccattgaggaggaagagctcatcgatgaagaagctaaaaatccgtggctaactgggaatttagtggaggaagcaaactctcagggtattatccaaaatcgcagtatttttaatctattcgctaatacgaatatttacatatttttccgtcattggacaacgatttatgagcggcttttggaaattaagcaaatgaatgaaagggtcacaaaggaaatcaacacaaggtcgacagttacttttgccaaagatctagatttattatcgagtcaactttccgaaatgggactagattttgttggtgaagacgcgtacaaacaggttttaagactgagtagaaggttgattaatggggatcttgaacatcagtggtttgaagagagtttgcggcaagcttacaataacaaagcgtttaaactctatacaattgataaagtcacccaatcgttggtaaagcatgctcataccttgatgactgacgctaaaactgcggaaataatggctttgttcgttaaagatagaaatgcctccaccacgagtgcgaaggaccaaattatctatcgcttgcaggtgcgctcacatatgtccaacacagaaaatatgtttagaatagagtttgataaaagaactctgcatgtttccattcaatatattgcacttgatgatttgacactaaaggaaccaaaggcagacgaagataaatggaaatattatgtaacatcgtatgctctgccacatccaacagaaggcattccgcacgagaaactgaagataccatttttggaaaggctcatcgaatttggacaagatattgatggaacagaggtagatgaggagttttcccccgaaggcatctctgtatcgacattgaaaattaagatccagcctataacctaccaactgcatattgaaaacgggtcttacgatgtttttacccgtaaggctactaacaaatatcctactattgctaatgataatactcaaaaaggaatggtttctcagaagaaggagttgatatcaaaatttctagactgtgcagttggtttgagaaataatttagatgaggctcaaaaattaagtatgcaaaaaaaatgggagaacctaaaagacagcatagcaaagacgagtgctggaaaccagggaatagagagtgaaaccgaaaaaggtaaaattacgaaacaggagcagtcggataatttggacagctctactgcaagtgtactgcctgcatccattactactgtaccacaagatgataatatagaaacgactgggaatactgaatcttcagacaagggggctaagattcaataagtagttttaactagatttagaacaaaaatctttagtacgacagggtctttcttctgatgtgtacctttaattaatgtcaacgatataacattgtaattttaaaattctaagtgttttt

SEQ ID NO: 2853 - DNA, 789 bp, Saccharomyces cerevisiae
gccaaacaataaacggctaaagataccgtggagaatggttttgataataaggccctcacagacattgatattattcaggaaagcgatgctcaagccaattgggagatatcctcttaaaagaaatttttttggtttgagcggtaccaatcacactattagggaacagcgatatgttttgcgcaaggccataaacgcccctccaagcacagtctacgctgcagtgtcagaagttgcccaatataaggaatttattccttattgtgttgattcgtttgtagataaacgaaatcctgtggataacaagcctctcattgcggggcttcgagttggtttcaaacaatacgatgaggaatttatatgcaatgttacctgtaaagatactgatcatacgtataccgttgttgcagaaacaatatctcataatttgtttcaccttttgatttcgaaatggaccataatgcctcacccaaatagaccaaatgcggccatggtagaacttctattaagatttaaattcaaatctcggatatataacagtgtctctctaatatttgcgaaaactgtgactgaattggtgatgaacgcatttgccaaaagagcataccatttagtaagattagcaatgctaaaaccttcttctaaagaaggctctccgtgatatcttccgtataatttcagataacaaagatcatgccatccaggataagcgtatgcatggttaaatttttagactatagaacaagatttttctgtatagttatgtttatagtatttaagctttctaacaag

SEQ ID NO: 2854 - DNA, 1272 bp, Saccharomyces cerevisiae
ataacatctgtcaagcttcaccattgtcaacacttttccactaggataatcctccaaaagtatagcaatgtcatcttccgcccccaaatacaccactttccaagggtcacaaaattttaggttacggatcgtcttggcaacattatcagggaaaccaataaaaattgaaaaaatccgttcaggcgacttaaatcccggtctgaaagattatgaagtgtcttttctaaggctgatcgagtcggtcaccaacgggagtgtaattgaaatttcttataccggtactactgtgatttataggcccggtatcatagttggtggtgcatcaactcatatctgccctagttccaaaccggtaggttatttcgtcgaaccaatgctatatttggctccattttcaaaaaagaaattttctatattattcaaaggcataactgcatctcacaacgatgccggtattgaagctatcaaatggggactcatgcccgttatggaaaaatttggcgttagagagtgcgccctacatactttgaaaagaggttcaccaccactaggaggtggcgaagtgcatttggttgttgattctttgattgcgcaacctataactatgcatgaaatagataggcccataatttcatcgattaccggtgtagcatactctaccagagtaagtccgtcgcttgtgaatagaatgatcgatggtgctaagaaggtattgaaaaatctgcaatgcgaagttaacataacggcagatgtctggagaggtgaaaattcagggaagagtccaggctggggtattactttggttgctcagtccaagcagaaaggttggagttattttgcagaagatatcggtgatgcaggttctatacctgaagaacttggtgaaaaagttgcctgtcaattattagaagaaatatcaaagagtgcagcagttggtagaaaccagcttccattagcaattgtttacatggtcatcgggaaagaagatatcggcagattgagaattaataaggaacagatagacgaaagattcataatcctcttgagagatattaagaagatctttaatactgaagtctttttaaaaccagttgacgaggcggataatgaagacatgatagctactatcaagggtattggtttcacaaacacaagcaaaaagattgcatagcatgttctaatattattcaatagatattagaccactgtatataagttatatatatatatatgattatttaggtgtaacttcacggacaactgtctagagta

SEQ ID NO: 2855 - DNA, 2261 bp, Saccharomyces cerevisiae
ctatcaccattattaccacactactatgttattgttacgcttttcatccacttttatataagttatacgtggttttacgagttctaatatttcacttttcagcttggaatacgccgttttaagaggactaaaagcaaggaaattacacacataataatataagtaatgatacgtccattatgttcaaaaattattatcagttacatattcgcaatttctcagtttctactggccgctaatgcgtggtcgcccacagatagttatgttcctggcaccgtgtcgtgtcccgatgacataaatctggtaagagaggctacgtctatatctcagaatgagagcgcatggttggaaaagaggaataaagtcactagtgtagctttaaaagatttcttgactagggctactgcaaatttttcagatagctcagaagttttgtcgaagctatttaatgatggcaacagcgaaaacctgccgaaaattgctgtcgccgtttcaggtgggggctatcggtccatgctaacaggtgcgggtgttctagcagcaatggataacagaactgaaggtgcttatgagcatgggctgggtggacttttacaaagcacaacatatttatctggtgcctcgggcggcaactggctagttggtacattagccttgaacaattggacatccgtgcaagacattcttaataatatgcagaacgacgattctatttgggatttgtcagattctattgttacccccggcggcattaatatattcaaaacagccaaaaggtgggatcatatctctaatgctgtcgaatctaagcagaacgccgattacaatacttctttggccgatatttggggcagagccttggcgtataattttttcccttctctaaatagagggggtataggcctgacttggtcttccattagggatttcccagtgtttcaaaatgctgaaatgccttttccaatttctgttgcggacggtaggtatcctggaacaaaagtcatcaatttgaacgcaacggtttttgaatttaatccctttgaaatgggatcctgggatccctctttgaactcttttgccaacgttaagtaccttggaacgaatgtctccaatggtgtaccattggaaaggggaaaatgtaccgcaggctttgataatgcaggttttatcatgggtacttcctccaccttatttaaccagtttcttttgagaataaactccactcacttacctagtttcatcacaagattagcaagacattttctaaaggatttatctcaagattttaatgatatcgctgtttacagtcctaatccatttaaagacacgaagtttttggatagtgactatacgacaagtattgttgattcagacagcctattcttagttgacggcggtgaagacgacgaaaatgttcctgtgttaccgcttatacaaaaggaacgtgatgtggacattatttttgcggtagataattctgccgatatgagattggcttggcctgacggttcttctttagtccatacctatgagcgtcaattcgttaagcaaggtcaaggtatgtccttcccatatgttccagatacgaatacattcgttaatttgggtttgaacaagaaaccaaccttcttcggttgcgatgctaataatttgaccgatcttcaatatattccacctctagttgtttatctgccaaatgcagaatactctttcaatagtaatcagagcgcgttcaagctatcatattccgaatcccaaagaagaagtatgattcaaaacgggtttgaaattgcaactaggaacaacttcactgatgatcctgaattcatgggctgcgtcggctgcgccatcattagacgtaagcaacaagctttgaatattactttgcctccggaatgtgaaacctgttttaaaaattattgctggaatggtaccctggatactaccccattaccagatgttgaaaaggatgttcaccactcctttatcaacgtcaatagcttcaacagctccataggacaagaagaaagtctttacgccggatcttcagcttcccagtcatcgtcttcatcatcgtcttcatcttcgtcttcggaaattccttcggctactgcaacccttgagaaaaaggcagctactaattctggatcacatttatctggcataagtgtaaagttctctgctatgattatgcttactttattgatgtttaccggagcagtataatatctcttgcgtaataacggtatacaaaatgaggc

SEQ ID NO: 2856 - DNA, 315 bp, Saccharomyces cerevisiae
acatttcaacataggctgagttgctttggaaggccatgatgtgtattataaattctgagtcttttcatggttctcagaaaagatcgggcgtgtggtctagtggtatgattctcgctttgggcgacttcctgattaacagggggacaaagcatgcgagaggccctgggttcaattcccagctcgcccccttttttactattgaaaagtattcggtcagacgtagctgatcgatgtagcatgtgtacgcatttctagatatcgagtaatttccgctgatgtataatatatatatatgtgtgtgtgtgtgtgtttttc

SEQ ID NO: 2857 - DNA, 655 bp, Saccharomyces cerevisiae
tgaagctacttaaaagtagaacaaaaaagagttactcgaacgttgaactctttgattatttaaagatttcagtttaacaaaaaaagtaaagtaacgtgagaatgtctgattcaacaacttcccccacaaccacattttctacttcattatcaccaaatgcgaccacatcattttttttgtggtaacatgggagtgatgtatacggccatgtctggatacgaaacagaagacgcacaagcctactgggcatgcggtagagcatatgaatcagcttttgcaacgttgactaaaaaggttccaggaaccacattctcagctgatatgccaacatctacttggcatggtgtcctggattgcggctattcctcttcaattaacgtggcagaaaataaaagttcgcccatcgattattggaattgtggtagaacatatgccaggaattatgctctgtccgatgcgctttcactgaagccaacgaatatgttacagtactttctattagtattattttttatctgcattatactatgagaaaagctcattaatatttgagcacttagataaagttgcatatgtgtatgaatacattctgaagcagccattaattattaatttattcaagggcataatcagtccaaaatttatgtttttacaa

SEQ ID NO: 2858 - DNA, 2009 bp, Saccharomyces cerevisiae
taaatagtgtgaagtttttgaggtgactgactttctcaacacgtcgagcacgacatttcccaaaaatagctgaagaacataagctaagcaaattacgcaacacactctcatatgaccgaagactttatttcttctgtcaagcgttcaaatgaggagctgaaggagcgaaaatctaactttggatttgtagaatacaaatccaagcaattaacatcatcctcatcacacaattcaaactcatcgcatcacgatgatgacaaccaacacggcaagaggaatattttccagcgatgtgttgattctttcaagtctcctctggacggctcgttcgacacaagtaatttgaagaggactctgaaaccaaggcacttaatcatgattgccattgggggcagtataggtactggtttgtttgtcggtagtggtaaggcaatcgccgaaggtggtcctcttggtgtcgtcattggttgggctattgcaggctctcaaatcatcgggacgattcatgggctaggtgaaatcacggtgcggttccccgttgtcggggcctttgccaattacggcacaaggtttttggatccaagtataagttttgttgtttcgaccatatacgtgctacagtggttttttgtattacccttagaaatcattgcggcggcaatgaccgtacagtactggaactcgtctattgaccccgtaatttgggtagccatcttttatgctgttattgtttccataaatttgtttggtgtacgaggttttggggaagcggaatttgcattttccaccataaaagcaataacagtttgcggattcattatattgtgcgttgtcctcatttgcggtggaggtcccgaccacgagttcattggcgccaaatactggcacgaccctggttgtttggccaatgggttcccgggcgttctatctgttcttgttgttgcttcgtattctctcggtggtatagaaatgacgtgcctggcatcaggtgaaacggaccccaaaggcttaccaagtgctatcaagcaagtgttttggaggatcttatttttctttttgatatcactgaccctggtaggattcctggttccatatacaaaccaaaacttactgggtggttcatctgtggacaactcaccttttgtcattgccataaaattgcatcacattaaagccttgccctccatcgtcaatgcggtcatccttatcagtgttttgagtgtaggtaactcctgcatcttcgcttcaagtagaacgttgtgttcgatggcccaccaaggccttattccatggtggtttggttatatcgaccgtgctggtaggccactggttggcattatggcaaattcactatttggattactagcatttctggtcaaatctggctcgatgtctgaagttttcaattggttaatggccattgccggcctggccacgtgcattgtctggttgagcatcaacctgtcacatatcagatttagactggcgatgaaggctcaagggaagtctctggatgaattagaatttgttagtgctgtcgggatttggggatcagcgtattccgctttaatcaactgtctaatcttgatagctcaattctattgttcactatggcccattggtggctggaccagcggcaaagaaagggctaaaatattttttcaaaattatctgtgtgccttaatcatgttatttatattcatcgtccacaaaatttattacaagtgtcaaacaggcaaatggtggggggttaaggcgttaaaggacatagatttggaaaccgatcgtaaagatatcgacatcgaaatagtcaagcaagaaattgccgaaaagaaaatgtacctagattcccgtccatggtacgtgagacagttccatttctggtgttaataccgaagaaacaagttcaatttatttttgtagaatatttttttttctcttctctagtactcatccttcataattaattattccagatcatttaatgcataacgacatgacaataaaaa

SEQ ID NO: 2859 - DNA, 1675 bp, Saccharomyces cerevisiae
tcgtatataaaagtaaacagtgggctgtaacaaacatattatatatcactcgctacacacacagctctaaatagctatgttactacgttctcttacaagtgccttcgttttaagtgctggtttggctcaggctgctagcagcagtaacagttccacaccatccattgaaattaaaggcaatgcattttttaattcggaatcaggtgaaaggttttatatccgtggtgttgattaccagcctggtggttcttctaacttgactgatcccttagcagacgcatctgtctgtgacagagacgtccccgttctgaaagatctagggataaatactgtcagagtttatactgtggataactcgcaagatcattcccattgtatgaaactattgcaggagaacggtatatacttgatcctggatgtcaatacccccacgagtgctatttctcgttacgatccagcctgctcctataacgctgactacttacaaaatgtctttgccaccattgatacctttgctgattacgacaatgttctaggttttttcgctggtaacgaggtcatcaatagtgttaatactaccaacactgctacttatgtcaaggcagtggtcagggacatgaagaaatacatcaaggctagaaaatacagacaaattccggtaggttactcggctgctgatatcgtcgctaacagacaattggctgctgaatactttaactgtggtgatgaagctgacgctagaatcgacatgtttggtgttaatgactattcttggtgtggtgaatcttcatttgtggtatcgggttattccaccaagatgaagctatatcaagattactccgttcctgtcttcttaagtgaatttggttgtaaccaagtcaagagctctcgtccattcacagaaattgaagctatctattccactcaaatgtcttctgtattctccggtgggctagtctacgaatattccaatgaaactaacaattacgggctcgttcaaattgatggtgacaaggtcactaaattgacagattttgaaaacttgaaaaatgaatacagcaaagtatccaacccagaaggcaatggtggttacagtacttccaacaactattctacatgtcctgattatgaaaagggtgtctgggaagctaataacactttgcctgctatgccaagtgctgcttctgcttacttcacatctggagcaggttctcctatgggaaccggaatcgccacccaacaaagttgtgatgctaaggacgatgacgacgaagaagacgacgacacctcctcttcatcctcttcttcctcttcatcttcatcttccgcttcttcatcttctgaatcatcatcctcgacttcaaaggcatcttcctcctccccttctgctagcgaaacgagcttgctaaaatctgccgcatctgctacttcgtccagccaatcgtcctcgaaatcaaagggtgctgccggaattattgagattcctttgatattccgtgctttggcagaactttataacttggttttatgagttttcacccccgttctttaccacattgtttctaattattccgttagcgccgcttacttttaatgttcttaagataaaaaaacatcattaatattattattaaaaaattcatatatatacctatatctatatgcactatttatg

SEQ ID NO: 2860 - DNA, 2815 bp, Saccharomyces cerevisiae
ccgatttgaaaagcttaccatctgccacacgcattctactccctaatttccacacacagtgtttttgtttctataaagaaaaagaaaaccaaaatactgtactttttcccataattttctttccatacgcctatatgcccatactttgcccggtttatcgaacaacgctgtgaattttgcgagtcataaaagacttatcgtaccattataccccattcattatcaaaacattatcttatttatatatccaatttaaaatcctgttttttaagaaataatttccaatacattattataacttattgatacctatttagaatcgatatttggtcttttctttgagaagaaaaaagaaaagaaataaaaaaaaagttcacaaaagtttgtcatggaacaccaagatagttcgccacctagattcaggaactctggctctaatagagtcactgtgtataacggtactaccctgcctacgatgcccaagagcgccacaccaacatcgagctcaacaacagttactacgcatttgcaaaatattaaggaggaggaaacaaacgatgacgaactcacccaagtggatcgttcatctcctcgtgttttggggaggatctcctctacgtcctcatcttcatccaatattgatttgcgcgataacttggacatgttacacgaaatagaaaaatcaaatactaatatttctttatcagctcctaatttgcatgaggaactgggcgttctcagcgataaaggtaacagtaaagaagaattggctttgttaccacctttacctcacacaggagaaatggaaatcactccacaatttgatatcaacgaggctatttttgaacgagatgacatcagccactcttcaaggctagaaccagatgacgtgttaacaaagttagcgaactctactcgagatgctacgggtgaagatcaggggtttgttgtcatgactcatggccacgatgcgtcgacaaacgacgattcgcaattaagcgctactattcttgacaatcagacgtcatttgatctttctaaagctctagagatgactagccattcaaatatttctaatattattaatagttccggttctgagggaagacgttcaaggacaccggtaagcaattccactctgaaaccaaatttatcatctcctgaaagcgcagaacgtgaagcaaacacgacttcgtcctcctctacgtcggatcacggggcaacaatgcaatatgatcccaagaaaataataactccaattcctgttttaccttcctctgtccgtgaacagcaacagaacaatgcacctttgagagaaagaagcagatctaattctagtgcactggcatctacactgagagatacgatcatttcaggactgcctcaaaatattaattctgtagaaagaaagttatcaaggaagagtaacaggagtaggaagaatacggtgacttttgaagatcgtcttcagaaattgccacccttaagcacccaaatttcgaaccagtacgccaaggtagcaccagctgagaacaatatcgccttacactttcataacttacctacaccagtatcaaacactcaaacgcctgttacgtttcagtctgaatccggactgacagggggagaaaagaaaatgccttttttgagaagagcatctagtgccctattaagaaagacatctgccaaaaattgctccaatttaaccagaacaaatacacctactttatcgacatcctcaacatttgagtcagatctaaatgctcggcagcccatgctaattcgacgatcttccactattgataataaactacctaggaggcagctttcgtgctcgaagctttattcgcgcctcaattcggacagcaagtttgcgaatagcagtcgagcttcggaggaggtcttagtgtccactccaaatgacacagaacacgtctacagaaagacatctctaggttctaagataaagagaggttttactagaatattgagcgacagtaataatagtaaggaaattctcactttatcacccaaatctatggtgactacggggcctacagaattgtcgttttcctctttatcaaccgtgggaggacatccgacaacgccagtctcaaaagaaaatgatcgagtttcaatagatggcgtgagtacatttaatcgagcatcaacatctcttccagaatcatcaacagacgacatctctccactacgcgaagaaggtaagattaatgttcctaaaagaacgtcaagtagaaagatactgtctaaaaattcaagcaaaaaaaatgtactgcctgaacagcaaacaaagccaagtgaaatatatctggataaagaagccttacaaagttttgttcccgtactctctgtcacagagggtactcatcgcatcaatcgctcgtcgttacaaacgcaatctaccatcggattatgcattaccaatttaagaaacaaagaaggcatgaagctcaatgccaaggaatacgtggaaatcctggctcagcagcaacgcaaggaagatgaaaggtatgctgttttggaaagaaaatttgcatcttgtagatggtgcagtgataaggacctgcagtatttgaaaaagaaacgaatttccatgaataagatatggtctgattatgtccgattttaccgtggaaagttgaacaacccatgaaggaaaaaggtcttggctatatataacggcagacaaaatataagtatacacgtatatatggtggtaaacacgcatatactgtatgccatgtatttaccattacatagttatttacgcactctataaaaagttaacattgca

SEQ ID NO: 2861 - DNA, 866 bp, Saccharomyces cerevisiae
tcaggatcagttgcataaacacaattacacaaaatgagtggttacgatagagctttgtccattttctccccagatggacacattttccaagtggagtacgccctggaggcggtaaagaggggtacctgtgctgtaggtgtcaagggtaagaattgtgtagtattgggctgcgaaagaaggtctactttgaagctgcaagacactagaattacgccttccaaagtttccaaaattgactcgcatgtggtgttgtcattttctggtttaaatgcagattccagaattcttatcgagaaggctagagtggaggcccaaagtcacagactaacgttggaggatcccgtgacggtggagtatctcacacgttatgtcgctggtgtgcaacaaaggtacacgcagtcaggaggtgttagaccatttggtgtgtcgacgctgattgccggcttcgacccgagagatgatgaacccaagctttaccagaccgagccaagtggtatatactcttcgtggtccgctcagaccattgggagaaactccaagacggtacgtgagtttttggagaagaattacgatcgcaaagaaccaccagccacagtggaagaatgtgtcaaacttactgtaagatctctgttggaggtagttcaaacaggtgcaaaaaatattgaaatcactgttgttaagccggactcagatattgttgcgttgagcagtgaggaaattaaccagtacgtcacccaaatcgaacaagaaaagcaagagcagcaagagcaggacaaaaagaaaaaatctaaccattaaaaacggcgatatatattgggcataaaacctatataaaataacagcaataataaaaatgcaaaatataa

SEQ ID NO: 2862 - DNA, 645 bp, Saccharomyces cerevisiae
atttctacttccgtttattcaaaagctttttctattattttagtgatttttttctcattggaaattcatacacaacaacagaaccaatcatacaaaaatgaagtacttagctgcttacctattattgaacgctgctggtaacaccccagatgccaccaagattaaggctattttggaatccgtcggtatcgaaatcgaagacgaaaaggtttcctccgttttgtccgctttggaaggtaagtctgttgacgaattaattactgaaggtaacgaaaagttggctgctgttccagctgctggtccagcttctgctggcggtgctgctgctgcctctggtgatgctgctgctgaagaagaaaaggaagaagaagccgctgaagaatctgacgacgacatgggtttcggtttattcgactaaggttgagtaaatttgtgcaatctcgttatatcatatcttggaagttatagagggaagggcgcaaaaataaaccctttcctcttttttacggcgaccatactctttttttcctaatccttttcaagtttaaatccatgatttaatatctatttatacatataaataatataagtaatggtttaatgcattgtttcaaaaaaaaaataaaaaaaaaagggaagaaatta

SEQ ID NO: 2863 - DNA, 1443 bp, Saccharomyces cerevisiae
gcaaaaaagaacattggagagagatttactgctcatacaagtaacaatgtttactcgaaggtttattccagttgttcagtcaactaagcaaaacatcggtaaatatgtgcgaaaagatgctaggttcactttattaacatacaacatgctctcaccgtcatatatgtggccacaggtatacacatacgttgcagagccatacaaaaactggagttataggcacagactgctggagaaagaacttttgaatactttcaaggctgatattatgtgtctccaagaaatgaccgcaagagattatgaagattattggcacgattccataggggtagatgtcaattatgggtccaaattcatttccaagacacccccaaagtattggaaaaaaccggttaaagatatggacggtgtatctattttctataatcttgcaaaatttgactttatatcgtcatcagggatctacttaaaccagctactgaatgttttcaatcaaagggaactgaaatacttatacaataagaaggtaacattaaccgatggtgcttccaatgttattggtgaagacagcttattggatgttttaaaaggcaagaatcaggtatgcttattcgtatctctaagacataaggagacgggtactatttttgtcgttttaaatactcatttgtattggaaatatgacgaagttaagctaacacaatgcatgattataatgagagagttatcaaagatcattaagcagctcctaccgggagatgtaaaaggccaagaaagggtgaagattttattcactggtgatctaaattctacaagagattcgctagttgttaattttctgcaaggtcagatagttagccatggagaccttaatcttattaacccaatgaggccgtatttggatcgttgtgtctatgacgatataccaaaggattattttgtacatacgtgctattcaggaaaattgaagggcatctttgattacgtatggtaccatgattcagattttttactaactaagatcctaaccggtaatgaagtatcagacgaattgctagcgtctaatcagttgggtttacccaatgaaaaccatcctagtgatcatatacctctactaacagaattcaaaatactgtgaggcattactatcttgccttttttgtgctttttttcttcattccttgttttattttatttgtacctctcttataaccttgttatcatactttttattcatttcaaatattctttccattattgcagtattctttaagtaatattccgaacgtgttccataatttgggtatgaatgtatttatagaaatatataaaacgcatgatttttcttttttatatgtatattatactattagaactatgtaaaaaaatgccagcatgtatagaggaagctacaagagataagaaataactagtaataatata

SEQ ID NO: 2864 - DNA, 1631 bp, Saccharomyces cerevisiae
cacttcaagcaattataggaagaaagcactactcctataaaatatggcacactatccaccttccaaggatcaattgaatgaattgatccaggaagttaaccaatgggctatcactaatggattatccatgtatcctcctaaattcgaggagaacccatcaaatgcatcggtgtcaccagtaactatctatccaaccccaattcctaggaaatgttttgatgaggccgttcaaatacaaccggtattcaatgaattatacgcccgtattacccaagatatggcccaacctgattcttatttacataaaacaactgaagcgttagctctatcagattccgagtttactggaaaactgtggtctctataccttgctaccttaaaatctgcacagtacaaaaagcagaattttaggctaggtatatttagatcagattatttgattgataagaaaaagggtactgaacagattaagcaagtcgagtttaatacagtgtcagtgtcatttgcaggccttagcgagaaagttgatagattgcactcttatttaaatagggcaaacaagtacgatcctaaaggaccaatttataatgatcaaaatatggtcatttctgattcaggataccttttgtctaaggcattggccaaagctgtggaatcgtataagtcacaacaaagttcttctacaactagtgatcctattgtcgcattcattgtgcaaagaaacgagagaaatgtgtttgatcaaaaggtcttggaattgaatctgttggaaaaattcggtaccaaatctgttaggttgacgtttgatgatgttaacgataaattgttcattgatgataaaacgggaaagcttttcattagggacacagagcaggaaatagcggtggtttattacagaacgggttacacaaccactgattacacgtccgaaaaggactgggaggcaagactattcctcgaaaaaagtttcgcaataaaggccccagatttactcactcaattatctggctccaagaaaattcagcaattgttgacagatgagggcgtattaggtaaatacatctccgatgctgagaaaaagagtagtttgttaaaaacttttgtcaaaatatatcccttggatgatacgaagcttggcagggaaggcaagaggctggcattaagtgagccctctaaatacgtgttaaaaccacagcgggaaggtggcggaaacaatgtttataaagaaaatattcctaattttttgaaaggtatcgaagaacgtcactgggatgcatatattctcatggagttgattgaaccagagttgaatgaaaataatattatattacgtgataacaaatcttacaacgaaccaatcatcagtgaactaggaatttatggttgcgttctatttaacgacgagcaagttttatcgaacgaatttagtggctcattactaagatccaaatttaatacttcaaatgaaggtggagtggcggcaggattcggatgtttggacagtattattctttactaggtgtacatgtactatacacatagatgctaggaagatgatgctagaacttgattaacaattagttaaggaatatataatcacacttctacataaatttgctgttttaggctca

SEQ ID NO: 2865 - DNA, 1192 bp, Saccharomyces cerevisiae
aaaagtctctttgagaggattgagaaatagtgcaaaaagatctactaataacgaatagttatgactgttactgacacttttaaactgtttattttaaggcatggtcaaagtgaattaaactcagaaaacatattctgcggatggattgatgctcaattaacggaaaaagggaagtctcaggcccgccactctgcaaaattgatcaagcagttttgcgattctaacaatatctctttgcctcagattggctatacttcaaggttgattcgaactcagcagaccatggacgttattctcgaagagttgggactaaaacacaccaattatgtaattactacgaatacaaacattaaggaggagctgcaggacacaagatttgaaggaagtatgcctgtgttgcaaacctggaggttaaatgagcgtcattacggcgcatggcaaggacaaagaaagccagatatcttgaaagaatacggtaaggaaaaatacatgtatatcagaagagattacaacggaaaaccccctaaagtcaacctaaacctggaaatggtccaagaggaaaatgatcaggggtcctccacaggctatgattttaaggagcccaatagacacttaaaatacggccccgaagagaaggctaatgagcgtctgccagaaagtgagtctctttgtgaagtggtcgtcagattgaaaccatttttaaataatgttgttctgtctaccgccaacaaaatcagtcaagaatcgtgtgttatagttgggcatggcagctctgtaagatctctgctgaaagtattggaaggtatctcagatgaagacatcaaagatgtcgatattcccaacggcattccgctagttatagagttggatagagacaattactcttttgtgaggaaattttacttggatccagaatcagctaaagttaatgctcaaatggttcgtgatgagggtttcgaaaagaatccatgaatagtttttaaaaataaaaaattagcgccatttttttcatggtttccttttatatttccttctttctttattgatagaataatgagtaacgaaaagcagctaaataaacgtgtttaaatttctataagaagtttttatagattgtataacaaagaaacttttttcttattattatttttttgtttttataattcattatatgtaggtatatctttatcta

SEQ ID NO: 2866 - DNA, 2299 bp, Saccharomyces cerevisiae
gaacattgaaaagaagaaaaaaaaaactgagcactgcaccattaagtcctcaaagatgagccactttttcgccgatcatgatgctcctctgagcatgctttctgttaaaacagaatactttcctcaattgactgataaggaacaaaaatatgcgcatttcatgtcaaaggcctcccatgcgggttcaagggttgtaatgagacaagtttctcatgagagtgagccaatttttgacctaatccttgccattcattcaaagctaaacggcaagtacccagaggacgatattacgcagaagcagcaaacgggtttgtatttggaatacgtttctcaattcttatctaatttgggtaatttcaaatcgtttggtgacactaagtttattcctcgttgtgaggtaaaattcttcaaacagcttttggagctggccaagattaatccgtgttcttctccgctcactttatctcctgttgacgttaaccatgaattcacatctcatcatcttttttccaccatcaatgagctaattgatattggtatttaccatgtggaagagaaggcggctctcttagggtttccctctcaaggttatacttcagcctattatctgggtttacctgtgacacctgaagatatggctcttttgaaagagcagttgtttgctgaacttgccatcttgcctgaaaacacaagaatcaacaaagttggtgaaaacagtttccaaatctgggttgcctctgagaatgtgaaaaaccagataacagaaacctaccccagtggacagatcacattatccaatgctgtaaccaaagtagaattcatttttggtgatcattcacgtgaaatgcgtttagtagcatcgtatttaaaggaagctcaaaaattcgcggctaatgatactcaaaaagcaatgcttcaggaatacatcaaccactttgtcactggctcttctcaagcacataaagaagcacaaaaactttgggtcaaagatatatctcccgtcattgaaacaaatatcggttttatcgaaacatatagagaaccctcgggcataattggagaatttgaatcgttggttgcaattcaaaacaaagaacgtactgctaaattttccagcttggttaacaacgcagaagaattcatttccttactaccatggtctaaagattacgaaaaaccgattttcaatccaccagatttcacctctctagaagtattaacgtttactggatcgggtataccagcgggcatcaatattccaaactatgatgatgttcggcttaaaattgggttcaagaatgtttctttggggaatatcttaagcgcggctgccaaaagctcatccaagcatccgccaagttttatatcgcaagaagatcgcccaatttttgaaaaatatcaaagtgattcttttgaagtccaagtaggcatccatgaattattaggacatggttcaggaaagttgttgacagaatttacagacggctttaattttgataaggaaaaccctcctttaggtttggatgggaaaccggtgagcacatactacaaagttggtgaaacttggggttccaaatttggacagttagctggcccatttgaagaatgtcgtgcggaagtaattgccatgtttttgcttactaataagaagattcttgatatttttggtttccatgatgtcgaatctcaagataaagtgatctacgctggatatctacaaatggcccgtgcgggtctcctagctttagaatactggaatccaaaaactggtaagtggggacaaccacacatgcaagcaagattttctatcatgaaaacatttatgaagcactctacagataagaatttcttaaagttggagatgaacagcacgaatgatgattttgccatcaagttggataaatctctcattaaaacagcgggacatgaatgtgtgaaagactatttaaagcatttgcatgtttacaaatgttcaggcgatgtggaacagggaagtaagtactttattgatagatcaacggtgacaccggatttggcgtctttaagagacatcgtcttatctaagagattgccaaggagacaattcatacaatcgaattcttatattgacgacaataacaaggtaaccctgaaagaatatgatgaaaccccacagggtatgctccaatctttccttgatagagaattatgatgtccttaagagcacacgttttaattagcaacctttgctgttgcttttgttcaagctattagattatgtaaacagatatatattatgtaagtgtgacaggatacgaca

SEQ ID NO: 2867 - DNA, 1801 bp, Saccharomyces cerevisiae
gtattttttttttttttttttggttttacttttttttcttcttgcctttttttcttgttactttttttctagttttttttccttccactaagctttttccttgatttatccttgggttcttctttctactcctttagattttttttttatatattaatttttaagtttatgtattttggtagattcaattctctttccctttccttttccttcgctccccttccttatcaatgcttgctgtcagaagattaacaagatacacattccttaagcgaacgcatccggtgttatatactcgtcgtgcatataaaattttgccttcaagatctactttcctaagaagatcattattacaaacacaactgcactcaaagatgactgctcatactaatatcaaacagcacaaacactgtcatgaggaccatcctatcagaagatcggactctgccgtgtcaattgtacatttgaaacgtgcgcccttcaaggttacagtgattggttctggtaactgggggaccaccatcgccaaagtcattgcggaaaacacagaattgcattcccatatcttcgagccagaggtgagaatgtgggtttttgatgaaaagatcggcgacgaaaatctgacggatatcataaatacaagacaccagaacgttaaatatctacccaatattgacctgccccataatctagtggccgatcctgatcttttacactccatcaagggtgctgacatccttgttttcaacatccctcatcaatttttaccaaacatagtcaaacaattgcaaggccacgtggcccctcatgtaagggccatctcgtgtctaaaagggttcgagttgggctccaagggtgtgcaattgctatcctcctatgttactgatgagttaggaatccaatgtggcgcactatctggtgcaaacttggcaccggaagtggccaaggagcattggtccgaaaccaccgtggcttaccaactaccaaaggattatcaaggtgatggcaaggatgtagatcataagattttgaaattgctgttccacagaccttacttccacgtcaatgtcatcgatgatgttgctggtatatccattgccggtgccttgaagaacgtcgtggcacttgcatgtggtttcgtagaaggtatgggatggggtaacaatgcctccgcagccattcaaaggctgggtttaggtgaaattatcaagttcggtagaatgtttttcccagaatccaaagtcgagacctactatcaagaatccgctggtgttgcagatctgatcaccacctgctcaggcggtagaaacgtcaaggttgccacatacatggccaagaccggtaagtcagccttggaagcagaaaaggaattgcttaacggtcaatccgcccaagggataatcacatgcagagaagttcacgagtggctacaaacatgtgagttgacccaagaattcccattattcgaggcagtctaccagatagtctacaacaacgtccgcatggaagacctaccggagatgattgaagagctagacatcgatgacgaatagacactctccccccccctccccctctgatctttcctgttgcctctttttcccccaaccaatttatcattatacacaagttctacaactactactagtaacattactacagttattataattttctattctctttttctttaagaatctatcattaacgttaatttctatatatacataactaccattatacacgctattatcgtttacatatcacatcaccgttaatgaaagatacgacaccctgtaca

SEQ ID NO: 2868 - DNA, 1685 bp, Saccharomyces cerevisiae
atgagagtaagttggtcgaaagtgactttgttggaggttgctacgaggctaggaacgcagtctggatgtcaatgagtaatattgttgtttttggaggggactcgcaccccgagttagttactaagatctgtgaaaatttggacattcacccatcgaaagtagaattagggaagttttctaatggggaaacgaacattgctcttcgcgaatctgttcgtgaaaaggatgtatatatcatccagagtggttgtggccaggtgaacgacacgttcatgcagttgctgattttaatcagtgcctgcaagtccgcttctgcctcgagggttacagccgtaatgccatatctctgctactcgagacagccagatattccatatactgccaagggtgctcccataatttccaagcctaaagaaaactatacttttgaatcgcatccaggcacacccgtgtcatcttctttaatgacgcaaagaccaggtgctgagagctcgttgaagagtttggatagtgcaatacgatcaactatcaacttagaaaatcctcaacctatcagaacaccaaacagcagtgctacggcgaataacaatttcgacatcaagaagacgctttctttttcaagaattcctatgattcccggtggtaagttacaaaatacaagcaatagcacggacgctggtgaattgttcaacgctcaaaatgcaggctataagctatgggtagtacaagccggtactttgattgctcatttgttgagtgctgcaggtgctgaccatgtgatcacaatggatttgcacgatccacagttccctgggttttttgacattccagtggataatctctactgtaaacccattgcacaaaactacatccagcatcgcattccagattatcaggatgctgtgatcgtttctccagatgctggtggtgcaaagagagctacggctattgcagacgccttggaattgtccttcgccctaattcataaagaaagaagatctcagttattgaagggccctccagatgcgacgttaacctctggtggttcgttaccagtatctccaaggccattagttactactttggtttcctcccaaaatactacttcttcaggtgccactggggttgcggcccttgaaatgaagaaaacaacttcaacatcttccacctcgtcgcaatcttctaattcgtccaagttcgttcaaactaccatgcttgttggcgatgttagaaacaaggtgtgtattatagtcgacgacttggtggatacttcatacactattacaagagctgcgaaattgttgaaggatcaaggatctaccaaagtttatgccttaataacgcacggtgttttttccggtgatgcgctagaaagaatcggccaaagtagtatagataagttgatcatttctaacacggttcctcaagatagaacactacagtacctaggtaaggacagagtggatgttattgatgtctcctgcataatcggtgaagcaattagaagaatccataacggtgaatccatttctatgttgttcgagcatggatggtagtggcattgatgtgttcatttttttattgataaaaataggggaaagtgtctatatattttgcgtataaaattctctacatttttttttctttgtttagtatgtgtattgaaacattttatttataggtta

SEQ ID NO: 2869 - DNA, 345 bp, Saccharomyces cerevisiae
caggtgacttcaaataataatttataactacgacaatgggtgctgcttatcatttcatggggaaagctatccctccacaccaactagccattgggacattaggactgctaggtttattggttgttccaaatccttttaaaagcgcaaagccaaaaacagtcgacatcaaaacagacaacaaagacgaggaaaaattcattgaaaactacttaaagaaacattcggaaaagcaagatgcgtaaatatagcttgattgctgcgcggttgaagatcttttgtacatacaataaatattctttatatatacagctttcgatattcaagatttaaacattaaattattaa

SEQ ID NO: 2870 - DNA, 1461 bp, Saccharomyces cerevisiae
atatgtttacctgaggaaaaaggaattcaaggctcacgtaaatctccatgatatgagtttgataaggtgtatcagacgaaagaagactgaatcgaggtaattgcggcggcacttgcttcagtaacgcccaaaggagagttctggtaaatgaacaactcaaagactaaccaacagatgaacacctcaatggggtaccccttaaccgtctacgatgaatgtaacaaattccaactaattgtgccaactttagatgcaaatatcatgctttggtgtattggacaactttcactgctgaatgattctaacggttgtaagcatttgttttggcaaccgaatgacaagtcaaatgtccgaatcttactaaataattatgactatggtcacttgttcaaatacttgcaatgtcaaagaaaatgctcagtttatatcggagaaggaacgcttaagaaatataatttgactatttctacatcctttgacaactttttggacctgacgccctccgaggagaaggaaagcttatgtagagaagacgcacacgaagatcccgtatctccaaaggctggttccgaagaagagataagccctaattccacctctaatgtggttgtgtcaagagaatgcttggataacttcatgaaacaactccttaagttggaagaatcgttaaataagttggaattggagcaaaaggtcacaaataaagaacctaaccacagaataagcggtacgattgacataccagaagataggtccgaactagtgaactttttcacagagttgaaaacagtcaaacaacttgaggacgtttttcaacgttaccatgactatgagaggttatcacaagaatgtgacagtaagacggaaatcgcctctgaccattcgaaaaaggaaactaaaatagaagtggaacccccaaatgagcgctcattgcaaatcacaatgaaccaaagggacaattcattgtatttccagttgtttaacaacacaaactctgttttggcaggcaactgcaaactgaagtttactgacgctggcgataagccaaccacgcaaattattgacatgggtcctcatgaaataggaataaaggagtacaaggaataccgatactttccatacgcacttgatttagaggccggctccactatcgagattgaaaatcagtatggagaagtgatcttcttgggcaagtatggctcttctccaatgattaacttaaggccaccttcaagattatctgcagaaagtttacaggcatcccaagagccattttactcctttcaaatcgatacgttaccagaactggatgactctagtatcatcagtacatccatttcactctcttatgacggtgacgacaatgaaaaagccctgacttgggaagaactctaggtcaaactctatttttatacagcaatgagtaccttttcacatacacataaatatattaaatataat

SEQ ID NO: 2871 - DNA, 344 bp, Saccharomyces cerevisiae
aacgtcttgaagctcaggtaaggggctagtagatgcaatgaatgacgatgaagatagagcccaactgaaggctaggctgtggatccgtgtggaagaacgattacaacaggtgttgtcctctgaggacataaaatacacaccgagattcatcaactcattgctggagttagcatatctacaattgggtgaaatggggagcgatttgcaggcatttgctcggcatgccggtagaggtgtggtcaataagagcgacctcatgctatacctgagaaagcaacctgacctacaggaaagagttactcaagaataagaattttcgttttaaaacctaagagtcactttaa

SEQ ID NO: 2872 - DNA, 992 bp, Saccharomyces cerevisiae
acatcgctcgacgacctcaattatgcaacttgtgccgctagaattgaatagatccactctaagtgggatatctgggtccatctccatctcctgctggatcattgtgtttgtccctcaaatttacgagaacttttaccggaagtcgtctgatgggctgtctttattgttcgtggtactttggttggccggcgatgtctttaaccttatgggtgccgttatgcaacatcttttgtctaccatgatcattcttgctgcttactatacggtggcagatatcattttactaggtcaatgtctatggtacgataatgaggaaaaaccagcagtagaccctattcatctctcccctgccaatccaataaacgaaaacgttctgcacgatgtgttcaatgaacaacaaccgcttttgaattcccaaggtcagccaaatcgtattgatgaagaaatggctgctccttcatccgacggaaacgctggtgatgataatctccgtgaagtcaattcaagaaatttgataaaagacatatttattgttagtggtgtagtttttgtaggtttcatctcgtggtatgtaacctactgcgtaaactacacgcaacctcctcccgtggaggatccatcactgcctgttcccgaactgcagatcaattggatggctcagatattcggttacttaagtgcccttttgtatctgggttcaagaattcctcagatattactgaattttaagagaaagtcttgtgaaggtatcagtttcctattctttttgttcgcctgtttgggtaataccacatttattttctctgtgattgtcatttctttagactggaagtatctaattatgaatgcttcctggttggttggaagcataggtactttattcatggatttcgtcatattttcccagtttttcatttacaaaagaaataaaaaatttatactgaattaacatgttctatctaatatttatttaacatatttttgacctcaca

SEQ ID NO: 2873 - DNA, 2183 bp, Saccharomyces cerevisiae
aagcaaagttatttcgtgtcttccgcctaacagaacgtaagcagttgaccatactttagtatagagtacgaaaaaacacaaagaataccttaataaaataaacattgtcgttcgctaggaaaacggtaacgaaaacaaaaaactaaaagaagaaaagaggcaggacgcagtaaaagcaagaaaactgcttttttttcatggctgaaatgaagaattcgacagctgctagttccagatggacgaagagtcgtctctcccatttctttccctcgtacactaatagcagtggtatgggggccgcctcaactgatcaatcttctacgcagggagaagaactgcaccataggaagcactgtgaagaagacaatgatggtcaaaaaccgaaaaagtctcccgtatccacctctacaatgcaaataaaatctagacaggatgaggacgaggatgacggtcgaattgtcattaaaccagttaacgatgaagatgatacatcagtgattataactttcaatcagtcaatatccccttttattattacattgacattcgttgcgtccatttctgggttcatgtttggttatgatactggttacatatcgagtgcgctaatttctatcaatagagatttagacaacaaagttttaacttatggagaaaaagaattaattacggccgccacatcattgggcgctttgattacaagtgtgggcgctggtactgctgctgatgtgtttggaagaagaccatgtttaatgttctccaatctgatgtttttgatcggagcaattttacaaattaccgcgcacaagttttggcaaatggcggccggtagactgattatgggtttcggtgtcggtattggttctttgatttctcctctttttattagtgaaattgctcctaagatgatcaggggtaggttaaccgttataaattccctatggctgacaggtggtcaattgattgcttacggttgtggtgcgggcctgaaccacgtcaaaaacggttggagaatcttagttggtttgtccttgatacctactgttttgcagttttcttttttctgttttttgccggatacaccaagatactacgtaatgaaaggcgatttaaagagagcaaaaatggttctcaaacgaagttacgtaaacactgaagatgaaataattgatcaaaaagttgaagaattatctagcttaaatcaatcgataccaggaaaaaatccaataacaaaattctggaatatggtcaaggaattgcacactgtgccttcaaatttcagagctttgattattggttgtggtctacaagccattcaacaattcacaggttggaattccttaatgtatttctccggtacaatatttgaaactgttggattcaaaaattcttctgccgtttctattattgtctcaggtactaattttgtgttcacattaatagcatttttctgtattgataaaatcggccgtaggtacattttactgattggactacctggtatgactgtggcgctggttatatgtgctatagcgttccatttcctaggtattaagtttaacggtgctgatgcagtagtggcatctgatggattttcatcttggggcattgtcattatcgtatttattattgtgtatgcagccttttatgccctcggtatcggcactgttccatggcaacaatcggaattatttccacaaaacgtcagaggtgtagggacatcctacgctactgccaccaattgggcaggttctttagtcattgcgtctacgttcttgactatgttacaaaatattacaccaacgggtacattttcattctttgccggtgtagcatgtttatcaaccattttttgttacttttgttatccagaactatcaggattggagttagaggaagttcaaacaattttaaaggacggattcaatatcaaagcctctaaagctctagctaaaaagaggaaacaacaggtggccgaaggtgctgcccatcataaactcaaattcgaacctacacaggaaattgtagaaagttagactgctacaccaacaaaaaataaaagataaagaacaaaaaagaaggaagaaagctataaaagggagacaattcatttcatctaatcttaaaagtttttatttaaatatataagtaagagcgaagtatttaaaaataaaaattcataa

SEQ ID NO: 2874 - DNA, 537 bp, Saccharomyces cerevisiae
tcaaagaaacatacaaaactacgtttatatcaattaataatgtctgaaattcaaaacaaagctgaaactgccgcccaagatgtccaacaaaagttggaagaaaccaaagaatctttgcaaaacaagggccaagaagtaaaggaacaagctgaagcttctatcgacaacctaaaaaatgaagctactccagaagctgaacaggtgaagaaggaagaacaaaacattgctgatggtgtcgaacaaaagaagaccgaagctgccaacaaagttgaagaaactaagaagcaagcttccgccgccgtcagtgagaagaaggaaaccaagaaggaaggcggtttcttgaagaaattgaaccgtaaaattgcttccattttcaactaatcacacttgaatgtgctgcactttactagaagtttctttttctttttttaaaaataaaaaaagaggagaaaaatgctgtttattctgaccttttacataaatttttcttaattgtatctatctaataactaatcaatataataataataatactaa

SEQ ID NO: 2875 - DNA, 898 bp, Saccharomyces cerevisiae
taagaggaaaaagttacattagaggacaatactcaatctaacccttactagatgtgcgatagccatcaaaaggaagaagataacgcaaatacgagcgaaagggcgttattttttaattaccatgagttttcgtattcattctacgaagacctcggttccgaagacgctaaacccacagagcacgacgaagaccacaaattgtgtattacacatttcccgaatgtgtatgctgctcggggctctgccgagttccaggtgacccgggtggtacgagtgccccggcggttcgatgagtctcgcagcagccttgaaacgccacaatttagtacacagcttcccggtagcgagccggcggcaatcgtgggcgacgatggcactagctttgtgcggtgcgggcgttacgacattggggatcacgtgtttggctgctcctccgtctcgcctctgtcagaatatcttagtgcggcagagctcgcggaggttgtgcaccgggtaaacggattcttgctgcgtgaagaaggtgaggtgttcgggtggcgtaacttaagtggcctgttgctcgatatgcttacgggcggtctgtggagctgggttttggggccccttctttctagacctgtgtttcaggagtctctcgcgttagagcagtacgtggcgcagctaaactcgccgggaggtctgcttcacgagcgcggtgtgcgcctagtattgccccgacggtccgggtgcctatccctagatttcgtcgtgccccgacccaaatagttaaacgtgtggtttatgggtgcaccagggctttatcgtgttttatatcgatggcgatttgtgcctccagtgtatttttgtatatccaattaaggtttcttacctaattttatttttatcatctttagttaat

SEQ ID NO: 2876 - DNA, 2091 bp, Saccharomyces cerevisiae
tttcgactagttatttaattttgcagatagtcaagtattagtacaatatactgttataaattttttacgtgtatcttttactttttagtgtttaataactaaaatctcataccttactagatttctttctaaccttttttgcgaaagaaacaaaaagaaaaaatacggacagaaaaggtatactcaataaacaagaaattgaaaaagcgtgcataatacaaacaattggcccttttttattctgtattaatattactgtttatattacaatcttttcataaaagacgcaaatattttatttataaagaactttagcagtatacacaagtctgagaaaatagagaataagttaaataagcaatgagctctgacgaagaagatttcaacgacatctacggcgatgataagcctaccactactgaagaagtcaaaaaagaagaagaacaaaataaggctggcagtggtacctcgcaattagatcaactagccgcactacaagcattatcttctagcttgaacaaactaaataatccaaatagtaacaacagtagtagtaataatagtaaccaagacacatcttctagtaagcaagatggcactgcgaatgacaaggaaggttccaatgaagacactaagaatgaaaaaaaacaagaaagcgctacatcagcaaatgccaatgccaacgctagttctgcaggaccttctggcttaccttgggaacaacttcaacaaaccatgtcacaattccagcaaccatcttctcaatcaccacctcaacagcaagtaactcaaaccaaagaggaacgttcgaaagcggatttgtctaaagaaagttgcaagatgttcattggtggtctgaattgggacactacggaagataatcttcgcgaatattttggtaagtatggtaccgtcactgatttgaaaatcatgaaagaccctgcaacaggtagatctagagggttcggtttcttatcttttgaaaaaccttctagtgttgatgaagtggtaaagacacaacatatcctcgatggtaaagttatcgacccaaaaagagctatcccaagagacgagcaagataaaaccggtaaaatctttgttggtggtattggtcctgatgtgagaccaaaggaatttgaagaatttttttctcagtggggtacgattatcgatgcgcaactgatgttagataaggataccggtcaatcaagaggttttggttttgtgacgtatgactccgctgacgccgttgacagagtttgtcagaataaattcatcgatttcaaagatcgcaagatcgaaatcaagagagctgagccaagacatatgcaacaaaaatcatcaaacaatggtggtaacaatggtggaaacaacatgaatcgtcgtggcggtaacttcggtaaccaaggcgatttcaaccaaatgtatcaaaaccctatgatgggcggttacaacccaatgatgaatccgcaagcaatgacagattactatcaaaagatgcaagaatattaccaacaaatgcaaaagcaaactggtatggattatactcaaatgtaccaacaacaaatgcagcaaatggcaatgatgatgccagggtttgccatgccacctaatgcaatgactttaaaccaaccacagcaagattcaaatgccactcaaggttccccagcaccttctgattccgataataataaatccaatgacgtccaaactattggtaatacatcaaacactgactctggttcaccgccattgaatttacctaatggtccaaagggcccatcacaatacaatgatgaccacaatagcggttatggctacaaccgtgatcgcggtgatcgtgatcgtaacgatcgtgaccgcgattacaatcaccgtagtggtggaaaccatagaagaaacggccgtggtggtcgcggtggatacaatagacgtaataatggctaccatccatataataggtaaaaaaaaagaaaagtgtagaaaactagagaaaagttttcttgtataattcaacaacccttctattaaataagcataagcaatttataatatatatatacatgtacgtgtattagtttcgaatagtta

SEQ ID NO: 2877 - DNA, 1514 bp, Saccharomyces cerevisiae
ctatatatacgtgtacgtaggtgctatgaaggcttcgctaagtacagttcaggtttattatttagcgaaggatgttacaagataataatgggcccgctgttaagagggcgaaaccctcagaaaggttgcaatgtgaatatttcatggaaaaaaagaaacgaagatgtgggatgaccaggagttctcagaacttgtattgttcagagcatctgaatttgatgaaaaaggcggctaattctcaagtgcataataagaatggcagtgaagcagagaaagaaagagaaagagtaccttgtccgctggatcctaaccatacggtttgggcagatcaattaaaaaagcatttgaaaaaatgcaataagaccaaactaagccatttaaacgatgataagccatactatgaaccgggctataacggagagaatggactgttatcgtcgtctgttaaaatagatattactgcggaacatttggtacaatctattgaattgctgtataaggtgtttgagggagaatccatggacgagctgcctttgagacaactgaacaataagcttatgtctctaaaacgattccctcaattgccttcgaatactaaacatgctgtacaacagtcttcactgatcgaaaacttagtggacgctggcgcatttgagaggccagaaagtttaaacttcattgagtttggatgtggcagggccgaattctcgcgctatgtcagtctgtaccttttaacacaattgacaagccttccagcggagcactcgggttcaaactcgaacgagttcgtgttgattgacagagcaactaataggatgaagttcgataaaaagataaaagacgatttttcagaaataaagtcaaactcaccttccaaacctattagctgccccagcatcaaaaggataaagatcgacattagggacttgaagatggatccgattttaaaatcgacacctggggacgatatacaatacgtgtgcatctcaaaacacctttgtggtgtagctacagatctaactttgaggtgtataggcaacagctcaattttacatggcgacgataacaacggatgcaaccccaaactaaaggcaatttgtattgccatgtgctgcaggcatgtctgtgactacggcgactatgtcaaccgcagttacgttacatcacttgttgaaaagtatagggcccatggctccatcttgacgtacgaaacctttttccgcgttttaactaaactctgttcatggggtacctgcggaaggaaaccaggtacggctattacagatatagtaaacgttgtcgaatcgtttgaaggggctgagccatatacaataaccattaaagagagagaaaatattggattaatggctaggcgtgtaatcgacgagggcaggttggtatatgtgaaagaaaagtttacagagtttaatgcggagctgataaggtacgtagaatccgatgtttctttagagaacgttgctatgttagtttataagaaatagagagcttttaat

SEQ ID NO: 2878 - DNA, 523 bp, Saccharomyces cerevisiae
tcaataagataaaatggctccatctgctaaggctactgccgctaagaaagctgtcgttaagggtactaatggtaagaaggctttgaaggtcagaacttctgctaccttcagactaccaaagaccttgaagttggctagagctccaaaatatgcttccaaggctgttccacattacaacagattggactcatacaaggtcattgagcaaccaatcacttctgaaaccgctatgaagaaggttgaagatggtaacattttggttttccaagtttccatgaaagctaacaaataccaaatcaagaaggccgtcaaggaattatacgaagttgacgtattgaaggttaacactttggttagaccaaacggtaccaagaaggcttacgttagattgactgctgactacgatgctttggacattgctaacagaatcggttacatttaatctaattggtttaattaataaatttaatattatttttaaatttttctttaaatatacaataaatctttcataacatgttaa

SEQ ID NO: 2879 - DNA, 734 bp, Saccharomyces cerevisiae
ctacaagatcaattagaaaatcacatcatcatggaggcagatgatcatgttagcttatttcgcttccccttcaagattcccacctttcgtggtataagaaaaggtggggtctatctttcaggtgctctctatgctctaggcttttggatatttctagacgcagtgctctattctagatattccaatgcatcagatgttcatgttacgttcattgactggattccttttctttgcagcacactgggaacattgattgtgaattctattgaaaagaatagattattgcagggagctttatcgtcagatggtggtgccttcggtagtggtgtaggcgatttagattcaagcatggcatggcaagctcgaaccgttttattttttggctttgctttattagctggtgggctatcaggctccattgtcgtgttgatcatcaaatttttagtcaaggattacaatacctatccaactttggggatgggagtaaacaatgtgttggggaatgtatgcatattattgagttgcgttgttttatggatagcccaaaatgttgaagatgaatattcatattctttgacgctctaagttaagttgaccaatattttcgaggccaattaaggcgatctgatttagataaaaaacgtatatatgtatttatcaacactttttcgaaaacaaaaagatttttagataggagtatgtacattccaatatatttgtaatgtttcacataa

SEQ ID NO: 2880 - DNA, 3091 bp, Saccharomyces cerevisiae
gcaagaaaaatatcatcctgacaagagacaggtattatataaaatatttctacatggaagtatactgttagttgaacataaattcaacaaaaggataccattacttcttctcaaagatcatcgaatattgctagaaagcgtaaaagcattttaccatgtcatcatcctcaagttcatcagagtcatcgcctaatttatcgcggtcaaactcactggctaacacgatggtttccatgaaaacagaagaccatacgggattgtacgaccataggcagcaccctgactcactgccggtccgtcaccaacctccaacattgaagaacaaggaaattgctaagtccactaaaccttctattcctaaggagcagaagagtgcaacgagatacaacagccatgtggatgtgggaagcgtacccagtaggggccgcatggattttgaagatgaagggcagggtatggatgaaacggttgctcatcatcaattgagggcatctgccattttaacttctaacgcgaggccttccagactagcccactccatgccacatcaaaggcagctttatgtggaaagtaatatacacacaccaccaaaggatgtaggtgtaaagagagactatactatgtcatcttctactgcatcatcaggtaacaaatccaagctgagcgcatcttcctcggcaagtcctattacgaaggttagaaaatcttcgctggtcagtcctgttcttgagatcccacacgaatcgaaatctgatacacactccaagctggctaaacccaagaagaggacatattctaccacatctgcgcattcatctatcaatcccgcagttttactgacgaaaagcacatcccaaaaatcggatgcagatgatgatacattggaaagaaaaccagtacgtatgaatactagagcttcttttgatagtgacgtatcacaggcgtcgagagattctcaagagacggaagaagatgtttgtttccctatgccaccacaattgcataccagagttaacggtatagatttcgatgaactggaagagtacgctcagtttgcaaacgcggagaagagtcaatttttggcaagtctgcaagtgcccaacgaacagaagtacagtaacgtttctcaggatatcgggtttaccagctctacttccacttcgggatcatcagctgccctaaaatatacaccaagagtttcgcagactggtgaaaagagcgagagtaccaatgaaacagaaatccatgaaaagaaggaagacgagcatgagaaaatcaagcctagtttacaccctggtatatctttcggtaaaaataaagttgaaggggaagagaatgaaaacattccatccaatgacccggcgtattgctcttaccagggtacagactttcaaattcctaatagattttcttttttctgttccgaatctgatgaaaccgttcatgctagtgatatcccttccttagtgtctgagggacaaacattctatgaattattcaggggaggtgagccaacatggtggttagattgtagttgtccaactgatgatgaaatgcgttgcatagcaaaggcgtttggtatccatccattgactgcagaagatatcagaatgcaagaaacacgtgaaaaggtggaacttttcaaatcgtattacttcgtttgtttccatacctttgaaaatgataaagaatcagaggatttcctggaacctattaacgtttacattgttgtctgtaggtcaggtgttttaacattccattttggcccaatatctcattgtgctaatgtcagaaggcgtgtaagacagttacgtgactatgtcaatgtcaattcagattggttatgttatgctttaatcgatgacattactgatagtttcgctcctgtaattcaatctattgaatatgaagcagatgcaatcgaagattctgtgttcatggctcgtgacatggattttgcagcaatgttacaaagaattggtgaaagtaggcgtaagacaatgacgttgatgagacttcttagtggtaaggctgatgttatcaaaatgtttgccaaaagatgccaagatgaagctaatggtattggaccggcactaacatctcaaataaatattgctaacttacaggcaaggcaggataacgccagtcatatcaaaaataatagttcgacaactgtaccaaataattatgcgcccaccacatcacaaccgaggggggatatcgccctatacttgggtgatattcaagatcatttgttgacaatgtttcaaaatttgctggcgtacgaaaaaattttttctagatcccatacaaactacttagctcaactgcaagtggaatcatttaattctaataataaagtgacagaaatgttgggtaaagtcaccatgataggtacaatgctagttccattaaatgttatcactggtcttttcggtatgaatgttaaagttccgggggagaattccagtatcgcgtggtggtttgggatattgggtgtgctgcttttgctggccgtccttggttggttcttggccagctattggattaaaagaatagaccctcctgcaacacttaacgaggccgctgaaagtggagccaaatcggttatttcgagcttcttgccaaaaagaaacaagagattcaatgatcgttccaaaaatataaatgtaagagccggtccttcaaacaaatcagttgcaagtcttcctagtagatatagccgctacgactgattagtgatgtgataaagatagaagatttaagtcacagaggcgtgcatctacgattttggcgtttcacattttttacacttaaattttagtgatctagccgtgaccttggcagcagtttccaaaatcattccatgaccatgtcatgcttaagaacgttagacccagaacaagtggacctgtattctaactcttcactcttgggcaaagataatagtattatcttttaccccattttttgtatgttttttcgtttattgagtttggcgtttcctatttagaaatagtacaatccggtcaatcattcgatagtgaaatatatatatttaactaggaaaattagtaaaacctcatttaaa

SEQ ID NO: 2881 - DNA, 653 bp, Saccharomyces cerevisiae
atgagcaacgaagttgacaggatggatgttgatgaagatgaatcgcaaaatattgcgcaaagctcaaaccaaagtgcgccagtggaaaccaaaaagaagagatttgaaattaagaaatggaccgcagtggcgttttggtcatgggatatagctgttgacaactgtgctatttgcaggaaccatataatggaaccatgcattgaatgccagccaaaggccatgacggacactgataatgaatgtgtagcagcctggggtgtctgtaatcacgctttccatttgcactgtattaataaatggatcaagacaagagacgcatgcccattagataaccaaccttggcagttagcaagatgcggtaggtgaaaaaatgaattgcccgtaaacatttaaatcataccgaggtagaaggattatggcatgttcctttttttttagagtatgtcaactggcgcagtagatacatgtttttctcttccacgtcgaattttgttatatacatagcataatcgagttgtatgcaccctttttgtttatctcgttagtaactcggggtaggaataagacatccacaaaggtgacagaacaaaatcatcctagccttgttcataatctacctctatatagccgctaaaaaattagtagtattttga

SEQ ID NO: 2882 - DNA, 1338 bp, Saccharomyces cerevisiae
ccaatcatgtttaaaagatatttatccagtacgtcatcaagaagatttacaagcattttagaggaaaaggcctttcaagtgaccacttactctagacctgaagatctatgtataactagaggtaaaaatgcaaagctgtatgatgacgtgaatggtaaagaatatatcgatttcaccgcaggtattgcggtgaccgcattaggccatgcaaatcctaaagtggcagaaattctgcaccatcaggctaacaaactggttcattcctccaacctttacttcactaaggaatgtttggatttaagtgaaaagattgttgaaaagaccaagcaattcggtggtcaacacgacgcctcaagagtatttttatgtaattctggtacggaagcaaatgaagctgctttgaagtttgcaaagaaacatggtataatgaaaaatcctagcaagcaaggcattgttgcatttgagaactcttttcatggccgtactatgggcgctttatctgtcacttggaatagtaaatatagaactccttttggggatttggttccccatgtctcattcttaaatttgaatgacgaaatgaccaaactacaaagttatatcgagaccaaaaaggacgagattgctggtttaattgtcgagcccatacaaggtgaaggtggggtttttcccgtagaagttgaaaagctaaccggattgaagaaaatatgtcaagataatgatgtgattgtcattcatgatgaaattcaatgcggtttgggccgttcaggtaaactatgggctcatgcttatttaccaagtgaggctcatccggatatttttacatctgccaaagcattgggaaatggcttccccatcgctgccaccatcgtcaatgaaaaagttaataatgctttgagagttggtgaccacggcaccacgtatggtggtaatccgctggcctgttctgtaagcaactatgttttggataccatagcagacgaagcttttttgaaacaagtctctaagaagagtgatatcttacaaaagcgcttgcgcgaaattcaagccaaatatccaaatcaaataaagactatcagaggaaaaggtttgatgcttggtgctgagttcgtcgaaccacccaccgaggtcatcaaaaaggccagagaattgggacttttgatcattaccgctggtaagagtaccgttagatttgttcccgcattaacgattgaagacgaactaatcgaagaagggatggatgcttttgaaaaggctattgaagcggtttacgcttaaatatactttgtaaattgtcatgtatagattgtttttttttttttcatctttatattgtag

SEQ ID NO: 2883 - DNA, 797 bp, Saccharomyces cerevisiae
tcgactaaccaagagcatacaagatgtctacgttcatattccctggtgatagctttcctgtagaccctactacacctgttaaactgggccctggcatatattgtgaccccaatactcaagaaatacgacctgttaatacaggtgttttgcatgtttccgctaagggtaagagtggtgttcagaccgcatatatagactattctagtaagagatacattccatctgtaaacgattttgtaatcggtgtcattatagggacattttcagatagctataaggtttcgttgcaaaatttctcctccagtgtttcactatcgtatatggcttttcccaatgcttcaaagaaaaacaggccaactttgcaagtgggagatctagtgtatgcgagagtttgtaccgcagaaaaggaactagaagccgaaatagaatgttttgactcaactacaggacgcgatgctggtttcgggatattggaagatggtatgatcattgacgtgaatttcaatttcgcacgccagttgcttttcaataatgacttcccgttattaaaagtgttggctgcacataccaagtttgaagtcgccattggtctcaatgggaagatctgggttaagtgcgaggaattatctaacactttagcttgttatagaaccataatggagtgttgtcaaaaaaacgacacggcagcgttcaaggatatagcaaaaagacagtttaaagaaatacttacggtcaaggaggagtagactaccatgtataattaaaatatataaacacatagatatcatcaatatttc

SEQ ID NO: 2884 - DNA, 670 bp, Saccharomyces cerevisiae
acaatagaagggcaagcatagaaaggatgggttactatgacattgatgatgtcctagcagatgggacagagtttccttgtaaatttcaatatgatattcctggtcttggttatttggaaaacaacccaggacgacccataacgaaaaacactaaactaagcctgccactatggttagcaagaatccttgcaattgtgggtggtgacgaagccttggtagatgaagaacctgtaccttttgtggaactcctgccaccagatatgttttctacgaaagttatgaacgctataaagaccgatccggtggctctggacttgcattccataaattcgcatttcttcagtctagccataaaatggataatgttgtttagcgaaaaagaactggccaatgtcgttagtgagctacttttgcaacgtgcccaagaacttaatcatcatgctagtagtttatcgattgatctcaatgcagactcgaccggaaaaaattcagcgaacactaatatagcaactagcacatttttactgaaactagaagaaatggagaaggagatatataaaaagtctcatgaatcttataaggacacgaaaaggtggatgtttaaaaaataacacatctttttctttagaaatacactatataaaataactataaaaaaaaggcaacagta

SEQ ID NO: 2885 - DNA, 1118 bp, Saccharomyces cerevisiae
tatctctgtagcgttgatataacgtgtacgattttcaaacaaacagatagcagtatcacacgcccgtaaatatgtcagttttcgtttcaggtgctaacgggttcattgcccaacacattgtcgatctcctgttgaaggaagactataaggtcatcggttctgccagaagtcaagaaaaggccgagaatttaacggaggcctttggtaacaacccaaaattctccatggaagttgtcccagacatatctaagctggacgcatttgaccatgttttccaaaagcacggcaaggatatcaagatagttctacatacggcctctccattctgctttgatatcactgacagtgaacgcgatttattaattcctgctgtgaacggtgttaagggaattctccactcaattaaaaaatacgccgctgattctgtagaacgtgtagttctcacctcttcttatgcagctgtgttcgatatggcaaaagaaaacgataagtctttaacatttaacgaagaatcctggaacccagctacctgggagagttgccaaagtgacccagttaacgcctactgtggttctaagaagtttgctgaaaaagcagcttgggaatttctagaggagaatagagactctgtaaaattcgaattaactgccgttaacccagtttacgtttttggtccgcaaatgtttgacaaagatgtgaaaaaacacttgaacacatcttgcgaactcgtcaacagcttgatgcatttatcaccagaggacaagataccggaactatttggtggatacattgatgttcgtgatgttgcaaaggctcatttagttgccttccaaaagagggaaacaattggtcaaagactaatcgtatcggaggccagatttactatgcaggatgttctcgatatccttaacgaagacttccctgttctaaaaggcaatattccagtggggaaaccaggttctggtgctacccataacacccttggtgctactcttgataataaaaagagtaagaaattgttaggtttcaagttcaggaacttgaaagagaccattgacgacactgcctcccaaattttaaaatttgagggcagaatataaactttaaatgaaaataga

SEQ ID NO: 2886 - DNA, 2302 bp, Saccharomyces cerevisiae
cccaataagtgcgttatgacttctgaaaatccggatgtacttttatctagggtgataaatgtggtgagagcagcatcatcgttagccagtcaagatgtagacttttacaagaatttagacaggggatttagtaaagatctgaaatcaaaagcagacaaacttgcggatatggcgaatgaaataatcctctctattgatgagcatcatgaatcatttgaacttaaagaagaggacatttctgacttgtggaacaactttggaaacatcatggataatttgttagaaatgtcagaccattcgctggataagctgaattgtgcaataaactcaaagtcaagaggttccgatcttcagtatttaggcgaattttcaggaaagaatttttctcccaccaaaagagtcgaaaaacctcagttgaaatttaaaagtccaattgataacagcgaaagtcatccgttcatacctttattgaaggaaaaaccaaatgctttgaagccactctctgagagtttgaggttggttgatgatgatgaaaataaccccagtcactacccccatccttatgaatatgagattgatcatcaagagtatagtccagaaattctccaaattagagaggagattccctcaaaatcctgggatgattcggtaccaatttgggtagatacaagtacagaactcgaatcaatgttggaggacttgaaaaatacgaaagagattgccgttgatcttgagcatcacgattataggtcatactatggtattgtttgcctcatgcaaattagtacaagggaaagggattatttagttgatactctaaaacttcgcgaaaatttacatattctgaacgaagtgtttacgaacccttcaattgtgaaagtttttcacggtgcattcatggatattatttggcttcagcgagatttaggtttgtatgtcgttggtctcttcgatacttaccatgcgtctaaagcaatcggtcttcctagacatagtttggcctatcttttggagaattttgccaattttaaaacttcaaagaaatatcagttggctgactggcgtataagaccgctttcaaaacccatgacggcatatgctagagcagatactcactttttactaaatatatatgaccagttgagaaacaaacttatcgagtctaataagttagcaggtgttctttatgaatcaagaaatgtcgcaaaaagaaggtttgaatattcaaagtacagaccactgacaccttcttcagaagtttattctccaatcgaaaaagagagtccttggaaaatattgatgtatcagtacaacataccacctgagagggaagtattagtaagagagctataccaatggagagatcttattgcaagaagagacgatgaatcgccacgatttgttatgccaaaccagttattggctgcacttgtcgcatatacacctactgatgtcataggtgttgtttctttgaccaatggcgtaactgaacatgtccgccagaatgcaaaactattagctaatttgataagagatgcattacgaaacatcaagaacaccaatgaggaagctactcccattccatcttccgagaccaaagcagacggaatattgttggagactataagtgttcctcaaatccgtgatgttatggaaaggttttcggtgttgtgcaacagcaatatttccaagagccgagccaagcctgtcactaattcttctattctgttgggtaagattttaccacgtgaggagcatgatattgcatatagcaaagacggcttgccaaataaagtgaagacggaagatatcaggatccgagcacaaaatttcaagtctgccttagcaaacttggaggatatcatattcgaaatagagaaacctctcgttgttcctgtcaagctagaggagattaagacagtagaccctgcgagcgcacctaatcactcgcctgagattgataatcttgatgatcttgttgttttaaagaagaaaaacattcaaaagaaacaaccagcaaaggaaaaaggtgtaacggaaaaagatgctgtggattattcaaaaattccgaatatcttatctaataagcctggccaaaataatagacaacaaaagaaaaggagattcgacccatcatctagcgatagtaatggaccaagggcagctaaaaagaggaggcctgccgccaaaggtaagaatctgtcatttaaaaggtgattatgtaaaacaagcgtatttttttatttataaattatggtaattttcatttaagacctctaaattcatctaatcgaatatctgt

SEQ ID NO: 2887 - DNA, 1754 bp, Saccharomyces cerevisiae
gtcaggaattcttttcttcacatcaggcttcgcatagaaaatggccattggcaaaaggttactggtgaacaaaccagcagaagaatcattttatgcttctccaatgtatgattttttgtatccgtttaggccagtggggaaccaatggctgccagaatatattatctttgtatgtgctgtaatactgaggtgcacaattggacttggtccatattctgggaaaggcagtccaccgctgtacggcgattttgaggctcagagacattggatggaaattacgcaacatttaccgctttctaagtggtactggtatgatttgcaatactggggattggactatccaccattaacagcatttcattcgtaccttctgggcctaattggatcttttttcaatccatcttggtttgcactagaaaagtcacgtggctttgaatcccccgataatggcctgaaaacatatatgcgttctactgtcatcattagcgacatattgttttactttcctgcagtaatatactttactaagtggcttggtagatatcgaaaccagtcgcccataggacaatctattgcggcatcagcgattttgttccaaccttcattaatgctcattgaccatgggcactttcaatataattcagtcatgcttggccttactgcttatgccataaataacttattagatgagtattatgctatggcggccgtttgttttgtcctatccatttgttttaaacaaatggcattgtattatgcaccgattttttttgcttatctattaagtcgatcattgctgttccccaaatttaacatagctagattgacggttattgcgtttgcaacactcgcaacttttgctataatatttgcgccattatatttcttgggaggaggattaaagaatattcaccaatgtattcacaggatattcccttttgccaggggcatcttcgaagacaaggttgctaacttctggtgcgttacgaacgtgtttgtaaaatacaaggaaagattcactatacaacaactccagctatattcattgattgccaccgtgattggtttcttaccagccatgataatgacattacttcatcccaaaaagcatcttctcccatacgtgttaatcgcatgttcgatgtccttttttctttttagctttcaagtacatgagaaaactatcctcatcccacttttgcctattacactactctactcctctactgattggaatgttctatctcttgtaagttggataaacaatgtggctttgtttacgctatggcctttgttgaaaaaggacggtcttcatttacagtatgccgtatctttcttactaagcaattggctgattggaaatttcagttttattacaccaaggttcttgccaaaatctttaactcctggcccttctatcagcagcatcaatagcgactatagaagaagaagcttactgccatataatgtggtttggaaaagttttatcataggaacgtatattgctatgggcttttatcatttcttagatcaatttgtagcacctccatcgaaatatccagacttgtgggtgttgttgaactgtgctgttgggttcatttgctttagcatattttggctatggtcttattacaagatattcacttccggtagcaaatccatgaaggacttgtagttacattttaacttatataactgtacaatgtcagtcagacgcaactgatataaaagatgtgctctacaagtaaagatta

SEQ ID NO: 2888 - DNA, 958 bp, Saccharomyces cerevisiae
caatccaataataaaaaccaactattgtaagcgctcccgatatacctaacatgcgtcaaaagagggctaagtcatataggaaacaacttcttgtttacagtcacacatttaagttccgtgagccatatcaagttttggttgataatcagcttgttttagaatgtaataattctaattttaatctaccgagtgggttgaaaagaacgttgcaagcagacgtaaaggtcatgatcacacagtgttgcatacaagcgttatatgaaactagaaatgatggtgcaattaatttagcgaaacaatttgagagacgtcgttgtaaccactcttttaaagatccaaagtcacctgcggagtgcatcgaaagcgtcgttaatattagcggtgcaaataaacacaggtatgtggttgcttctcaggacatagatttgaggaggaagctgaggacggttccgggtgttccattaatccatttaaccaggtctgttatggttatggaacctctcagtacggcgagtgccaaggcaagcaagattactgaagaacaaaaattgtataagggtctcaatgatcctaatattgaaaaacttcaagaaagtggtgatggatcaggaaaggaatctatcactaagaaaagaaagcttggtccaaaggctcctaatcctttgagcgtaaagaagaagaagaaagtcaactcgcccagcgatgaggtgaaagacaaagaagatacttctaaagaaaagaaaaaaagaagaagaaggaaacacaaaagcaacactaacgtccccgtttcaaatgggaccacagccgcgcagtaaattttttccttaagttaattgactggccaatcttttgaatataattgcgcatcttccactcttattgataaacgttacggaagtatttaatgtacatatgtaggatagtattaaataaacttcaaaaaattaagcctccgcaa

SEQ ID NO: 2889 - DNA, 2593 bp, Saccharomyces cerevisiae
ttggaaaactcttcatttcaaggataaaccatcgtcgccgtaagtattttgggtttcatttccttcccccctcgattttgcttttttttcctttttttgttagataaaaatataaacccttctccatatacctgttcacctcaataccgtctttaactggcttttttattttgtataaaagttctacttattaagatcaataggcacgtgctattttcgaacatccactttcaatatgatgcgtggtttcaagcaaagattaataaagaagaccaccgggtcttcttcttcttcaagcagtaaaaagaaggacaaagagaaggaaaaagaaaaaagttccactacctcatccacatcaaagaagcccgcttcggctagtagctcttcccacgggactactcacagttctgccagcagtaccggatcaaagtctacaactgagaagggcaagcaatctggtagtgttccctcgcaagggaagcatcatagtagctctacatcaaaaacaaaaacagcgacgaccccttcttccagcagcagtagcagtagaagttcaagtgtcagtcgctccggttcaagctccacaaagaaaacaagttcaagaaaaggacaagaacagtccaaacaatcgcaacagccatcacaatctcaaaagcaaggatcttcttcatcatctgccgctataatgaaccccactccagtactcactgttactaaggacgacaaaagcacttctggtgaagatcatgcacatcctactttgctgggggcagtatccgctgttccatcatctcccatttcaaatgcttcaggtacagcagtttcttctgatgtagaaaatggtaatagtaataataacaatatgaatattaatactagtaatactcaggatgcaaaccacgcctcctcacaaagtatcgacattccgagatcatcacactcatttgagagactaccaacacccacaaaacttaaccctgacacagatttagagttaattaagactccccaacgtcattcttcatctagattcgagccatctagatatacgccattaacgaaattgccaaattttaatgaagtttctcctgaagaaagaatccctttgttcattgccaaagttgaccagtgtaacactatgtttgactttaatgatccaagttttgacattcaaggtaaagagattaaaagaagcaccttagatgagctaatagaattccttgtaacaaataggttcacttacacgaatgagatgtacgctcatgtggtgaacatgttcaaaatcaatctgtttagacctattccaccaccagtaaatccagttggtgacatttatgacccagatgaagatgaacctgttaacgaactagcctggcctcatatgcaagctgtttacgaattctttttaaggtttgtggaaagtcctgatttcaatcatcagattgctaaacaatatattgatcaggactttattttaaagttactggaattatttgatagcgaagatatcagagaaagagactgtttgaaaacgacactgcatagaatatatgggaagttcttatcattaagaagctttattcgtcggtcgatgaataatatttttttgcaatttatttatgagactgagaagtttaacggtgtggcagaattgttagaaattttgggttccataattaatggatttgcacttccattaaaggaagagcacaaggttttcttggtgaggatattgataccattacacaaggtccgttgtttatcattataccaccctcagttggcttactgtatcgttcaatttctcgaaaaagatcctttattaaccgaagaggtagttatgggcttactgcgttattggccaaaaataaattccacaaaagagataatgtttctaaatgaaatcgaggatatttttgaagtgatcgaaccgctggaatttattaaagtagaagttccgttatttgttcaattagctaagtgtatttcttctccacatttccaagtggcggaaaaggttttaagttattggaataatgaatatttcttaaacttatgtatcgaaaatgccgaagtcatcctacccattatatttcctgcattatatgaattaacttctcagttagagctagatacagcaaatggcgaagatagcatttcagacccttacatgcttgttgagcaagcaatcaattctggttcgtggaatagggcaattcatgctatggcattcaaggcattgaaaatttttctggaaacaaacccagtattgtacgaaaactgtaatgcattgtacttatcaagtgtaaaagaaactcaacagcgtaaggtgcaacgtgaagaaaattggagcaaacttgaagaatatgtaaaaaatctaaggattaacaatgataaggaccaatacacaatcaaaaacccagaattaagaaacagtttcaacacagcaagtgagaataacacattaaatgaagagaacgaaaatgattgtgacagcgagatacagtgaaacagcaattcattacaagctcgaagaagtgaggaagtttagggcatgccacatttcaaaagagcagcagtatatgaagagcaa

SEQ ID NO: 2890 - DNA, 1536 bp, Saccharomyces cerevisiae
gaagggattaatttacatacaactagatccatctttctcaaaaatgacttcagtatcgccctcgccacctgccagtcgatcgggctcaatgtgctccgacttaccgtcctctttgcagactgagaaactggcacatattataggtcttgatgccgacgatgaagttctccggcgcgtaaccaagcagttgagcagatctaggagaattgcttgtctgactggggcaggcatttcgtgcaacgcgggcattcctgactttcgctcttctgatgggctctacgacctagtgaaaaaggattgttcacagtattggtctatcaagtccggcagggaaatgtttgatatttcgctatttagagatgacttcaaaatatccatttttgctaaatttatggagaggctctattcaaatgttcaattggcaaagccgactaagacgcacaagttcattgcgcatctaaaagataggaacaaactgctgcgctgttacacgcaaaacatcgatgggctcgaagaaagcataggacttactttatcaaataggaaattaccgcttacctcatttagttcacattggaaaaatctggatgtcgttcagttgcacggcgacctgaaaactctttcgtgtacaaagtgcttccagacttttccctggagcaggtactggtctcgttgtctaagaagaggtgagttaccattgtgtccggattgcgaagcacttatcaacaagagattgaatgaaggaaagcgaactcttggttctaatgtgggtattctaagacctaatatcgtcctgtatggtgaaaaccatccatcctgtgaaattattacgcaaggcctaaatcttgacataattaaaggcaatcctgattttttgatcatcatgggtacaagtttgaaagttgatggtgtgaaacaactggtaaaaaaattaagtaagaaaattcacgatcgtggcggcctgatcattctcgtaaacaagacacccattggcgaatcctcttggcacggcattatagactaccaaatccactcagattgtgataattgggtcacatttcttgaatcccaaataccagatttcttcaagacgcaagatcaaattaagaagttaagacagttaaaaagggaggcgagcgacttgagaaagcaaatgaaggcccaaaaagactcaatcggaacccccccaacaacccctctacgaactgcccaggggattgatattcaaggaaacaacgaattgaatacaaaaataaagtcgttaaacacagttaagagaaaaatactgtcaccagaaaactccagtgaggaagacgaagaggaaaacttggatacaagaaaacgcgctaagatacgaccaactttcggtgacaaccaagcctcataaacttaactattaaaattgagttaacgataaataatcgaggcagacacccctttgcataatatatcatccgtttaatttatcttccatttatatactcatacatataccaacggagatctgcatgtccgagaatacaaaaaatagtgaac

SEQ ID NO: 2891 - DNA, 1066 bp, Saccharomyces cerevisiae
atgcagatagtacaaattgagcaggccccaaaagactacataagcgacatcaaaataatcccttccaagtcactgcttttgattacgtcttgggatggctctttaacagtctacaaattcgacattcaagcaaagaatgttgaccttttacaatcgctacgatataaacatccgttattgtgctgcaatttcatcgacaataccgatctgcaaatatacgtgggaactgtacagggtgaaattctaaaagttgatttgataggtagtcccagcttccaagctttgacgaacaatgaagccaatttgggtatttgccgaatatgcaaatatggagacgataaactcattgccgcgtcatgggatggcctgatagaggttatcgaccctcgcaattatggtgatggagttattgctgttaaaaatttgaactctaataacacaaaggtgaagaataagatatttactatggatacaaactcctctcgattgatcgttggtatgaacaatagtcaggttcaatggtttcgcctgccactctgtgaggatgataacggaacaattgaagaatcaggactgaagtaccaaataagagatgtcgctcttttaccgaaagaacaagaaggttatgcatgtagcagcattgacgggcgagttgctgtggagtttttcgatgatcagggcgatgattacaactcaagcaaaagatttgcatttagatgccaccgtttgaatttaaaagatacaaacttagcgtatccagtaaattctattgaattttccccccgtcataagttcctatacacggctggctctgatggcataatttcatgctggaacctacaaacccgcaagaaaataaaaaatttcgccaaatttaacgaagacagcgtggttaaaattgcttgttcggacaatattctatgtctggcaacttctgatgatactttcaagacaaacgccgcaattgaccaaactattgaactaaacgcaagttcaatatacataatatttgactatgagaactgatatcttcgtgaagattcgtgtagtatgatagaacattcca

SEQ ID NO: 2892 - DNA, 2045 bp, Saccharomyces cerevisiae
gctctctcttcgcttctcctcctttaaggaataaagaaaaaatcacatacatagattaagtaaataggatctgctagaaaaattatatatagatcaatcatcttattaaggtatcttgtttaagcccaaaagtctgctcccaaattcctcactgtagctactaaaacaacctatacgcaagaaagatgtcattgacagccgatgaatacaaacaacaaggtaacgctgcatttaccgctaaggattacgataaagcgatagagctcttcactaaagctattgaagtttctgaaactccaaaccatgttttatattctaacaggtccgcctgttatacttctttaaagaaatttagtgacgcattgaatgatgctaatgaatgtgtcaaaatcaatccatcttggtctaagggttataatagactcggtgccgcccacttaggtcttggcgatctcgacgaagctgaaagcaactacaaaaaagccttggagttggatgccagtaacaaggccgccaaagaaggattggatcaggttcatcgtacccaacaggcaagacaggcacagcctgatttagggttgacacagttgtttgctgacccaaatttaattgaaaatttaaagaagaacccaaaaactagcgaaatgatgaaggaccctcaattagtggctaaactgattgggtacaaacaaaatccgcaagctattggccaagatctgtttactgatccaagattaatgaccatcatggctacattgatgggggttgatttaaacatggatgatataaaccaatcaaactccatgccaaaggaaccggaaaccagtaaaagcactgaacaaaagaaagatgctgaaccacaaagcgattccactacgagcaaggaaaattcctctaaagcaccacagaaagaagaaagtaaggaatccgagccaatggaagttgatgaagatgactctaaaattgaggccgacaaggaaaaggccgaaggtaacaagttttacaaggcacgtcaattcgatgaagctatagagcactacaacaaggcgtgggaactgcataaagatattacctatttaaacaaccgtgctgctgctgaatacgaaaaaggcgaatacgagacagctatttctaccttgaatgatgctgttgagcaaggtagagaaatgagagcggattacaaggtcatttccaaatcatttgcgcgtattggtaatgcctatcacaaattgggtgacttgaagaaaactatagaatactaccaaaaatcattgaccgaacatcgtactgctgacattttgaccaagttaaggaatgctgaaaaagaattgaagaaagctgaggcggaggcgtatgttaaccctgaaaaggcggaggaagcccgtcttgaaggtaaggaatattttaccaagagtgattggccgaatgctgttaaggcttacactgaaatgatcaaaagggcacctgaagatgctagaggatattctaatagagctgctgcactagcgaagttaatgtctttccctgaagctatcgcagattgtaacaaagccattgaaaaagatccaaatttcgtgagagcttatatcagaaaggccaccgcacaaattgctgttaaagaatatgcttccgctttggaaacactagatgcggccagaaccaaagatgctgaagtgaataatggttctagtgcaagggaaattgatcaactgtactacaaggcaagccaacaaagattccaacctggtaccagtaacgaaaccccagaagaaacctatcaaagggccatgaaagatcctgaagtggctgcgatcatgcaagatcctgttatgcaaagtattttgcagcaggcccaacagaatcccgctgctttacaagaacacatgaaaaatccagaagtattcaaaaagattcagacgttgatcgctgctggtatcatccggactggccgctaaaaataatacgaaatataactttattatcttgaattctttttttactgctttttcatacatacgtacatataatgatcttctcacttagta

SEQ ID NO: 2893 - DNA, 1131 bp, Saccharomyces cerevisiae
ctgtattttttcatcaatcttttacttgagaaatactagcttttttcaaattattcaagattaagggacttagagaactgatagaaaagcagatcatgggcagtagatcggagaatgtgggaacagtgactagagaaggctccagagtggaacaagatgatgtcctcatggatgatgactctgactcatcggaatacgtggatatgtggatcgatttatttcttgggagaaaaggccatgaatatttctgtgatgtcgatcctgagtacatcactgatcgttttaatctgatgaacttgcaaaagacagtttcaaaattttcctacgtggtacaatatattgtggatgatttggatgatagtatcctagagaatatgacacatgcccgtttagaacaattagaatcagattcccggaagctgtatggtctcatccatgcacgctacattataactatcaaaggattgcaaaaaatgtacgctaagtacaaagaggcggactttggaagatgtccccgtgtgtattgtaatttacaacagttgttaccggttggtttgcatgacattcctggtatagattgtgtcaagttatattgtccatcttgtgaggatctttatataccaaaatcatcgagacatagttccattgatggtgcatactttggaacaagttttccaggtatgtttttgcaagcatttccagatatggtacccaaacacccaactaaaagatatgttccaaaaatatttggatttgaattacataaacaagctcaactgacaaggtggcaagaactacaacgactcaagttagttgagaaacttgaatccaaagatgttgatttgacgaaaagtggtggttttaaaacctaactattaaagaaagaagaaaaaattcgaaatgaaatcctaggcgaaattgaaaacgaaaatgaaaataatggagaaacttcgtcataaaattgtgaaaatcaggtatcatttgttctcctagcattttctttcctagaatattactattttctacctccattcgtattttacttttcctatttaatattaaatttttatataccgttattgccccttacggcaataatacaaccagataaaagagcgtgctccgaagtta

SEQ ID NO: 2894 - DNA, 1287 bp, Saccharomyces cerevisiae
atggaagaaaaggaaggtatcaaggattcttctctccttgagaagagtaatgttccggaatcaattaatgaggatatttcaaagacgacggatgtggatctaaattccgatgggaaaaaggataatgacacttctgccaaggatggtacacctaaggttgaagaaaaggtgaacaagtcctcaggaattgatgaggacgaagtggtgacacccgctgaggatgcaaaagaagaagaggaggagcatccccccttacctgccagaaggaagtctgaggaggagccatctaaagagaatccaatattgcaagaattgaaggatgcttttcccaatttggaagaaaaatacattaaagcggtgatcattgcgtcccagggtgttttgagcccagctttcaatgccttactattcctatcagatcccgaatctggtaaagatatcgagttaccaacacaacctgtaagaaagaacccagaggcgccggcaagaagacgacaaactcaattagaacaagacgaattattggcacggcaattagatgagcaattcaacagctcacattcccgtcgtcgtaatcgtgatcgcgcaactagaagcatgcatgaacagcgcagaagacgtcataatccgaacgaaagggagcaacatcacgaagacagtgaggaagaagattcgtggtcgcaatttgtagaaaaggacctgccagagcttacggacagagccggtcggtcattacaggacacagcaaacaaagttagtaactggataagtgatgcttaccggagaaactttgcgtcaggtaatgagcaaaacgacaaccaacatggtcaccaagatcagcaagaatgggagccagagattgtggatttgtcacaaggcgggaaaaattcaagaccccagcaacctgagagaagaagattcaattcgtttggcgttcaagtcggtgatgactctttagaaagccacggaatcacactacacaacgaagatggatttgaagatgatgaagatgtgccacctcagttaccaacgagaacaaaatctggtgagtcgactggaaaagtagtggcagagacaacctacattgatactccagatacagaaacgaagaagaaatggcagccgctaccaccggaacccctggatactacaccaactaaagtaaacgctgtttctagaaataagaaaaatccggatgaggatgaattcttaatcaatagtgacgacgagatgtaaagctgatatctacgtacatgtgtatacgtgccaatatttggacgcatctta

SEQ ID NO: 2895 - DNA, 1673 bp, Saccharomyces cerevisiae
tattaattttcccgcctccccattaattgataaagataaaggttgtctgagcttacacttattataaacaatggacgatataatcacgcaagtttctccagataatgcagagtccgctccgattctacaagaacagcaacagcaacagaactcacagtacgaaggtaacgaggaggattatggtgattcattgattcatttgaatattcaagaaaaccattatttcattacgagggaccagttgatgtctctacctgaatccctattactgtgtttatttccctcaggtgtttttttggaccgttgtggtcaggtcattactaatttgaccagagacgatgaggtctacattgttaatttccctcctgattgttttgagtacatcatggagatatatacaaaagcgcatgatgatttgtataatcatcctgtggagaaattttttgacagaccatcaagtagctttgtttcgaatgcaaagggattttttggactgagtagcaataattcaatttcgagcaacaatgagcaggatattttacatcaaaagcccgctattattgttttgagagaagacttggattattattgtgtacctcaggaggaatttcagtttgattccactaatgaagaaaataatgaggatttattgcgacattttatggctcaagtgaaaatggctgctggcagttatttaacttcaaaaacatcgattttccaaggtttgtattcttcgaatagactaaagcaacaacagcaacaacagaaaattgaaaaggggtccaattcttcttcaaatactaaatctacttcgaaaaaattgggacctgctgaacaacatttaatggatatgttgtgctcctccggattcaccaaggaaacttgttggggtaacagaactcaagaaactggcaaaacggttataagttcactgtctctttgccgattggctaacgagacaactgaaggatttaggcaaaaatttaacgaggctaaggctaagtgggaggcagagcacaaaccttctcaagacaacttcatcaccccaatgcaatctaacatatcgattaactctttatctgcaagtaaatctaacagtaccatttctacagcaaggaatttaacaagcggaagtacagcacctgctacagcacgtgataagagaaaatcaaggctgtcgaaactagcagataacgttcgttcgcactcttcctcgagacatagttcgcagaccagaagtaaacctccggagttgcccaaattgtatgatctagtgccaaaacctaatatcaacgctaagctactattattttggagaaaacctgctcgtaaatgttggtggggtgaagaagacatagagctagaagtggaagtcttcggctcttggaaagatgaatcaaagaaaatcattgaattgatcttgccaacaaacgttgatcctgaagcagaactacataaaatcattgtacccgtccgattacatattcgtagagtttggactttagagttgagcgttattggggtgcagtgagtgtatataatatattagagaaagaaatggaaagagatcgggccaaagacacaatatgtaacagtatggtttcttggtatcccctctttctattcctcccttgttacgaaatgatgtatatttgtatctctataacaaaatt

SEQ ID NO: 2896 - DNA, 379 bp, Saccharomyces cerevisiae
agaacaaaaacaaaacacagacaaaataattgaaaaatggacggtatgtttgctatgccaggcgcagctgcaggtgcggcctccccacaacaaccaaaatcaagattccaagctttcaaggaatctccactatacacaattgcactaaacggtgccttcttcgttgcaggtgttgcgtttattcaatctccactcatggacatgttggccccacaattataaggggttggttcttgtatagttgagattttttcacttacctgtatatatattggtttttgggttctcaaaagaatttgtcaaatatgtttatattttattcccgaattatgtagagttagcagtgtatataatggaaaaaaagcaagtatgctttaca

SEQ ID NO: 2897 - DNA, 1526 bp, Saccharomyces cerevisiae
tatgacaaagtaatggcagaagtcttttaaggttaaagaggtagttgttttaaggaaacgaaaaagaaatgcctgttgaaaaagatttaaaaactgcctacaaagctttgtatgatgagaaggaaccactgaaggccctccatctttatgatgaaattctcaaaggctcacccacaaatttaacggctctcatttttaaggcagcatgtcttgaaaagctatactttgggttttctgattggcacagcgatgcaactatggaaaacgcaaaggaacttcttgacaaggctctaatgacagctgagggtaggggcgatagatcgaagattggtcttgttaactttcgttattttgttcatttcttcaatatcaaagattatgaactggcccaatcttattttaaaaaagccaagaatcttggttacgttgatgacactttgcctttatgggaagatcgtctggagacaaaattgaataaaaaaaataaaaagcagaaggattcaactaataagcatacaattaaaccagtggaaagtattgaaaacagaggagataataattcttctcatagtcccatttcacctctcaaaattgaaaccgctcctcaagaatcccctaaatttaaaatcgattggtatcaatccagcacctctgtcactatatcattatttactgttaatcttcctgagtctaaggaacaagtcaatatatatatttctccaaacgatagaagaactttatcgatatcgtaccaagtaccgaaatctggatctgaatttcaatacaacgctaagctttcgcatgaggtggatccaaaagcagtgtcattaaaaattttcccaaaaaagctggaaattaccttgagcaaaattgatagcacgcaatggaagaagttggaagaagatattttaacggaatcctcaaggttatcagatgagggtaaaaattctgattctgcaacccgcttattatcagcagaaacggcatcaaaagagagattgtcttatccatcgtcctctaaaaaaaaaatagattggtctaaacttgacattgatgaagaagctgatgaagaagcgggatcggctgatagtttctttcaaaagctttacgctggagcggatccagataccaaaagggctatgatgaaatcctttatagaaagtaatggtactgcattgagtacagactgggaagacgtatctaagggaacggttaaaacttcaccaccagaaggcatggaacctaaacattggtaaatgattagtatatacctacacaattacaatatgtagatatatagtatggtagtaatgttacattttcgatttagactagccaacctgcgtatttacttggaatgcttacatgattatattgaatattacaaattttattatgtccatattaatccagagtcacggtgcaatggaaaaaggaaagggagaatgatagaataaaagaaggaaagaaagagacaatgtagcgaaggctagaaagtgatgtgaaaaaaaaaaccacaaaaaaaa

SEQ ID NO: 2898 - DNA, 1359 bp, Saccharomyces cerevisiae
aacaacgggcacacacatttgttggagtttgtatgattgctaaaaaataaaaagtaattaaaaaaacatcatagagttgtaaggtctcagggaaatagaaggaacaataaacctaaaagaatagaagaaacagaatgccattacctccgtcaacattgaaccagaaatctaatagagtctactctgtagctagggtgtacaagaatgcctgcgaggagagaccacaagaatactgggactacgaacaaggggtgaccatcgattggggaaagatttccaattacgaaattatcaacaaaattggaagagggaaatattccgaagtgttcagcggtagatgtattgtaaacaaccagaagtgtgttattaaagttttaaaaccagttaaaatgaaaaaaatttatagagagttgaaaattctgaccaatctaacaggcggccccaatgttgttggcctttatgatatagtacaagacgctgactccaaaatacctgctttgatctttgaggaaatcaaaaatgttgatttcagaactttatatcctacattcaaacttcctgacatccagtattatttcacgcaattattgattgcgttagactactgtcactccatgggcataatgcacagagacgtaaagcctcagaatgtcatgattgatcctacggaacgtaaactaaggctgatcgattggggcctggcggagttctaccatccaggtgtagattacaacgttcgtgtcgcttcgcgttaccacaagggaccagaacttttagtaaacttgaaccaatatgactactccctagacttatggtcagtaggatgcatgctagcagctattgtcttcaaaaaagaaccttttttcaaagggtcgtctaatccagatcaactggtaaagattgccacagtactaggaaccaaggaactgttaggctatttgggtaagtacgggttgcacttaccatctgaatacgacaacattatgagagactttacaaaaaaatcgtggacacactttataacctccgagaccaaattagctgttcctgaagtggttgatttaatcgacaatttattaaggtatgaccatcaagaaagattaacagcaaaggaggctatggatcataagtttttcaaaacgaagtttgaataattggacaacaatactcttagcaaggcaattctttttccaccactgatttccatttataaaaagcaggggttttccttttttgtagcttgatattagagaatatccttaatgtgaatattaaattgcaaactctatttaacaacgaatgtagattattatatgaccagaaaatcactttatatagatataagagccttccgtaatg

SEQ ID NO: 2899 - DNA, 1308 bp, Saccharomyces cerevisiae
acacagttactacaacaatcaatcatgtctcacagaaagtacgaagcaccacgtcacggtcatttaggtttcttgccaagaaagagagctgcctccatcagagctagagttaaggcttttccaaaggatgacagatccaagccagttgctctaacttccttcttgggttacaaggctggtatgaccaccattgtcagagatttggacagaccaggttctaagttccacaagcgtgaagttgtcgaagctgtcaccgttgttgacactccaccagttgtcgttgttggtgttgtcggttacgtcgaaaccccaagaggtttgagatctttgaccaccgtctgggctgaacatttgtctgacgaagtcaagagaagattctacaagaactggtacaagtctaagaagaaggctttcaccaaatactctgccaagtacgctcaagatggtgctggtattgaaagagaattggctagaatcaagaagtacgcttccgtcgtcagagttttggtccacactcaaatcagaaagactccattggctcaaaagaaggctcatttggctgaaatccaattgaacggtggttccatctctgaaaaggttgactgggctcgtgaacatttcgaaaagactgttgctgtcgacagcgtttttgaacaaaacgaaatgattgacgctattgctgtcaccaagggtcacggtttcgaaggtgttacccacagatggggtactaagaaattgccaagaaagactcacagaggtctaagaaaggttgcttgtattggtgcttggcatccagcccacgttatgtggagtgttgccagagctggtcaaagaggttaccattccagaacctccattaaccacaagatttacagagtcggtaagggtgatgatgaagctaacggtgctaccagcttcgacagaaccaagaagactattaccccaatgggtggtttcgtccactacggtgaaattaagaacgacttcatcatggttaaaggttgtatcccaggtaacagaaagagaattgttactttgagaaagtctttgtacaccaacacttctagaaaggctttggaagaagtcagcttgaagtggattgacactgcttctaagttcggtaagggtagattccaaaccccagctgaaaagcatgctttcatgggtactttgaagaaggacttgtaagaagttttgttagaaaataaatcattttttaattgagcattcttattcctattttatttaaatagttttatgtattgttagctacatacaacagtttaaatcaaattttctttttcccaa

SEQ ID NO: 2900 - DNA, 1547 bp, Saccharomyces cerevisiae
aagcaacattttatacatttttgtactttatcttcaaatattaaggacaagaaagaaaaagaaaaagaatccatattctatattagtgtaacactatttttcttaaatattttttccagtactcccccagtttgataaaaagcattcattgaatttccccacatttgtgatatcttcaattgattagtttgaactagttctgaaaaataatattttacaatttgcattttcattacactatatcatctactattttttctcagaagcggaagttataactaatttgacaatgttttcaaatctatctaaacgttgggctcaaaggaccctctcgaaaagtttctactctaccgcaacaggtgctgctagtaaatctggcaagcttactcaaaagctcgttacagcgggtgttgctgccgccggtatcaccgcatcgactttactctatgcagactccttaactgccgaagctatgaccgcagctgaacacggattgcacgccccagcatatgcttggtcccacaatgggccttttgaaacatttgatcatgcatccattagaagaggttaccaggtttaccgtgaagtttgtgccgcctgccattctcttgacagagttgcttggagaactttggttggtgtttctcataccaacgaagaggttcgtaatatggccgaagaatttgaatacgatgacgaacctgatgaacaaggtaaccctaaaaagagaccaggtaagttgtccgattacatccctggcccatacccaaacgaacaggctgcaagagctgccaatcaaggtgccttgccacctgatctatctttgatcgtgaaagctagacacggtggttgtgactacattttctctttgttgaccggttatcctgatgaacctcctgctggtgtggctttaccaccaggttctaattataacccttacttcccaggtggttccattgcaatggcaagagtcttgtttgatgacatggttgagtacgaagatggtacccccgcaacgacatctcaaatggcaaaggacgttaccacctttttaaactggtgtgccgaacctgaacatgacgaaagaaagagattgggtttgaaaacggtgataatcttatcatctttgtatttgctatctatctgggtgaagaagttcaaatgggccggtatcaaaaccagaaaattcgttttcaatccaccaaaaccaagaaagtagttgacaaaaaaatgaaaaccactattatttaaattacggaaaaaaaaaaaccaataaacaaaaaacataataaaagaaatgaaaaaaaagaatattagtagagcatactgaattgttttcagaaagagagtgaaaggtaacaaaaatttacctacttttcctttttatttctctggtttcgtttcttttttttcggccaccctatttattttttcactgcttgtaaacaacgtctcacttcaatagtgtctccttcatgtactgagatactgctgcaagcgaaatatcacgaataataatataaaaaaaaaaaaaaaaaaaaaaaaag

SEQ ID NO: 2901 - DNA, 2134 bp, Saccharomyces cerevisiae
aaaaatattcactatggataaaagcatgatcaaaaaaagaggcaggcctcccatcaccaaagattatcccaatcccctacaaagccccatggcgcattcttcaatgcaggttcagaagcaggggcctcacagttttgccaaacctttgatgaaagtggggcaatctagtccatccccgaataaaagaagactcagcatcgatcatcatcataatttggcggcaactacgagaaagggcagatacaggggcgttcttctttctactcccaccaagaaatcgagcactaatggctctacgccgatctctaccccgtcttcgaatgacagctataataacacggtgttttctgaaacaaggaaaacctttcttcagagttcgccgcctatcatgacgtcttctccagctttccaaaagaaaaatgactacatgtttccttcacaggaacaattcaaactttctttaaccattaccgaaagtgggaaggccgttattgcaggatctttgcctttctctccatcgtcaaaatcgtctcatttaatgaacaataataataaaaagatcatgcaaaatgaaaaaattcacaaaggaagcaagaaaaatgcacccaagtttgagaagagacgtattctttctctcttaaaacagatgaagaatgagaaatattgtgatactgatacgctccccgaagcacctccagcgaaaccaagcagatctgacatcatcgacacagaattgccgactatcatagaaacttcagcttctccaataggcagtgctagaaacaataatatactgctttcgcaaccaccacaatcacccccttcaagcgcgcaacttaagcccccatccactccaaagagttctctacaattcaggatgggatttactcccaatgttgcactaaattccgtatcattaagtgatactatatccaaatctacaaatgctgtgggtgccagcaataataacaatcagaacggtaattccattagcaatatcgcggatgctaatactttacttaccttgactaatagcccgggagttttcttatcacctcgaaacaaaatgttgcccaagtcgactactgcatctaacgaacaacagcaggaattcgtgtttaagttttcaagtggtgacccgttattgcttactgacgacgcagatgggaattggccagaaatgctgttcaatgtatctaatacgcccagacgtcaaaaatgttttaacacacctccttcatggataaactttggttcacctggattattcagcccaccaagaagctctaatgtcatggtaaatggcaccactgtagccaccgcatcggatagcggcaacgtccatagacaattacaagctcaattggaggcgcaagtgcaagtgcaatcgcaatccaattctcctactcaaaggcaacaacaacagcgtcaatttcaaatacccccacctcacataaacatgaactcttccccgccacaaatcaatatcgcttccccacctcatcaatctatgtctcgggtgtcatctatttacttcaacaaagaaaaaaccacaacaggggtagcaaatatgctaggtaacaccaaaagcgaaaacttacagccgccggcgaatttatttaccgctgcccatggaccttcaactcctagaaatcaagaatttcaattacccactttgattgaatgcactccattaatccagcaaaccatgaatggctcattaggaaccaaatacataccaggtacttcaatttcgaacagtgcaactcctaatttacacgggttccctgttggaaccgggaaagctccctctagctttgacgattcactaaaacaaaacccgtacagcaacaaacaggatgatgctagaactgccttgaaaagattaatcgatgatcagtgaaaatagtcatagattcatgaaaacgatatgagccaaaaggaccattcaataatcatgaagcgttaaaaaatagtttacttaccttttttccttcttaaagcattttcccagagctgatagataatatattgaagtagtacttatatacctttcaactgatgcatgtgaatggagttgaccttcattcagtttaatgtaatgttattttaattcaagtgtaaaacgcacaat

SEQ ID NO: 2902 - DNA, 1323 bp, Saccharomyces cerevisiae
ttagcatatatataaagtgcgtaatgtgcgtgctaaaaaagctcactagtgcgtactctgcttatctctgcgtatccgccgatcaacatccgcggctaaaatggaacagaacaggttcaagaaagaaacgaaaacttgtagcgctagctggccgcgcgcaccgcagtcgacgctgtgtgcgacagatcgcctcgagctcacatacgatgtgtacactagcgcagagcggcaacgccgctctcgcactgccactaggcttaaccttgtgtttttgcacggcagcggcatgagtaaggtggtatgggagtactatttgccgcgtctggtagccgccgatgcggagggcaattatgccatcgacaaggttttgttgatcgaccaggttaaccacggtgattctgcggtacgcaaccgcggcagactcggcaccaatttcaactggatcgacggggcccgcgacgtgctcaagattgccacatgcgagttgggcagtattgacagccacccggcactaaacgtagtcatcggccactcgatgggcgggttccaggctcttgcgtgtgacgtcctgcagcccaatctgtttcatttgctcatcttgatcgagcctgtagtaatcacacggaaagccatcggcgccgggaggccagggcttccgcccgattctccgcagatcccagaaaatctttataactccctacgtttaaagacgtgcgaccatttcgctaacgagtccgaatatgtaaaatatatgaggaacggttccttttttaccaatgcgcacagccaaatcctgcaaaacatcatcgattttgagaggacaaaagcctctggagacgatgaagatggtggacccgttcgcacgaagatggagcaggctcaaaatctcctctgctacatgaacatgcagacttttgcgcctttcctgatcagcaatgtgaagtttgtgaggaagcggactatccacattgtgggcgcgcgctccaactggtgtcctccgcaaaatcagctgtttttgcagaaaactctacagaactaccatctcgatgtcattcccggcggctcccacttggtcaacgttgaggctccggacctggtgatcgagaggattaatcaccacatccacgagtttgtccttacctccccgctgcagtcctcacacattccgcaattgacccttgaagaaagagcggtgatgtttgaccgggctttcgactcgttcaagaatgaagctttggttaaaacgactaaacaaaaactgtaaacacttgtgtacactattacatatattattcaataataattaactgacgcaatctatgg

SEQ ID NO: 2903 - DNA, 1383 bp, Saccharomyces cerevisiae
gctcttcgaacactgaaccacacgcgtccgcatcaaactcttcctcccaaacatgaattggctgtttttggtctcgctggttttcttctgcggcgtgtcaacccatcctgccctggcaatgtccagcaacagactactaaagctggctaataaatctcccaagaaaattatacctctgaaggactcaagttttgaaaacatcttggcaccacctcacgaaaatgcctatatagttgctctgtttactgccacagcgcccgaaattggctgttctctgtgtctcgagctagaatccgaatacgacaccatagtggcctcctggtttgatgatcatccggatgcaaaatcgtccaattccgatacatctattttcttcacaaaggtcaatttggaggacccttctaagaccattcctaaagcgttccagtttttccaactaaacaatgttcctagattgttcatcttcaaaccaaactctccctctattctggaccacagcgtgatcagtatttccactgatactggctcagaaagaatgaagcaaatcatacaagccattaagcagttctcgcaagtaaacgacttctctttacacttacctatggactggactccaattattacctcgacaataattaccttcatcaccgtcttactcttcaaaaagcagtccaaactcatgttctccatcatatcttccaggatcatctgggcaaccttgtcaacttttttcatcatttgcatgatcagtgcctatatgttcaaccaaatcaggaatacccaattggcaggcgttggtcctaagggcgaggttatgtatttcttgcccaatgaattccaacaccaattcgccattgaaactcaagtcatggttcttatttacggaacattggccgcgttggttgtcgtattggtcaagggtatacaattcttgcggtctcatttgtatccagagaccaagaaagcgtacttcattgatgctattttggcctccttttgtgccttattcatttatgtcttctttgctgctttgacaaccgtgttcacgataaagagtcctgcttacccttttcctttactaaggttatcggcaccattcaaataagtcagtttttttttttgttttcaccataacaaagagatggaaagttatactagataaagatttttaaaaaatataaaagaaaataaaacgaaatttatattttacacagtgcatcttgtccctctctttctcgctaaaacttagtttcttcttcgcccatctcatgattcttcttatggtttgtgaggctgcctagtccaccgaatacccctttcttgatcttgccaatggcaccaacaccgccgcctatcacggtcgtaccagctttcaaaccagta

SEQ ID NO: 2904 - DNA, 2128 bp, Saccharomyces cerevisiae
caatgcaattgtcattaatcagtggcttggtaaggcaatagaattcagttataaaatataatattactagaacaggagcattatggtatcagccaacggcgacttgcacttgccaatttctaacgaacagtgcatgccggaaaacaatggatctcttggatttgaggcccccactccgagacagattctcagggttacgttaaatttgaaatacttaattgataaggtcgtacctattgtttacgatcccaatgatattgtttgtgaccattctgagattttatctccaaaagttgtgaagctggcttatgaagcatgtggcgggaaccctaaagacaaggccaacaaaagaaaatatcaatctgtcattattttttcacttcttaaagtttgtgagtggtattccatattggccactatggaagtgcacaatgccaaactttacgaaaccagaaatttagcctcacaacagttatgtaaattgttaattgaaagggaggagacaagagacctgcagtttcttttcatgcagttactgctgcgtcggtacgtaatcaacgagaacgatgaagatcaagaaccgttgaatgccttggaacttgccacagatatgcactgtactacagtgataggatcgagtggatttcagcgttgtttaaaatggatatggagaggatggatagtccaaaatggcttggatcccacaacttttatcaaggacgattcactggcggaagtgtcattgatctctcatttcaaccccgtaagattaaaggcgcctgtataccaaaattatttgcagatgatcttctcatttttgtttctagggctttataccttggtggttaatggtaaggactctgagagagtccaatctttcgatttgttagaaagcatattttatgttttcaatactggtttcatcttggatgagctcactaagctttattatattggttatgcgcacctatcgttttggaatttatttaatgataccacatatttgataatcacgtttgctatggggttccgtgcaatgagcgtaacgccccttaatgcaaaatactcttcagaagattgggataaaatatcatatagagtcttatcctgtgcagcaccatttgtgtggtcgagactcctactataccttgaatcacaaaggtttattgggattatgttggttatcctaaaacatatgatgaaagaatccattgtatttttcttccttctattcttaataatgataggattcactcaaggtttcttaggtttggattccgcagatggtaagagagatatcaccggacccatcctgggtaatttaacaatcaccgttttgggtcttggtagttttgatgttttcgaagaattcgctcccccatatgcggcaatactgtattatggttactattttattgtttcggttatccttttgaatatattaattgctttgtattcgactgcgtaccaaaaagttattgacaatgcagatgacgagtacatggctttgatgtcacaaaagacgttgagatacattagagcacctgatgaagatgtctatgtttctccattgaacttaattgaagtgttcatgacacctatctttcgtattcttccaccgaagcgtgctaaagatttgagctatactgtaatgacaatagtgtacagcccatttttgttgcttatttctgttaaagaaactcgggaggctagaaggataaaatataacaggatgaaaaggttaaacgatgatgccaatgaatatgatactccatgggatttgacagatggctacttggatgatgatgacggtttgttttctgataaccgaaattctggcatgagagccacccagttaaagaattcccgttcgctaaaactgcaaagaacagcagagcaggaagatgtccattttaaagtccctaagaagtggtataaaaacgttaaaaaatgcagtccctccttcgaacagtatgataacgatgacactgaagatgatgctggtgaagataaagatgaagtcaaagagctcactaagaaagtggaaaacttgacagctgtaattaccgatctactcgaaaaattagacataaaggataagaaagagtaaacgacatgtgttcaaata

SEQ ID NO: 2905 - DNA, 1166 bp, Saccharomyces cerevisiae
actctattagtaaacctctgggctttacacatataaaatcgcaggaaagttatatttcgaagatgccaccaaaaaagggaaaacaggcccaagcggctggtaagaagaaggataatgtcgacaagacgttcggtatgaagaacaagaaccgttctaccaaagtccaaaaatacatcaaacaagtgcaatcacaatccgaccccaagaaagaagagatgaggttaaagaaactcgaagaaaaaaagcgcagagaagccgaagaagctgaacgaagagcactattcaaccctgtagcagaccaaagggttcgtgcgggtgtagatcccaagtccatggtttgtgctctgttcaaactggggaattgtaacaaaggtgccaaatgtaagttctcacatgacttgaacgtcggtagaagaatggaaaagaaagatttataccaagatacaagaagtgaaaaggaaaatgacacaatggacaactgggatgaagaaaagctgagaaaagttatcctgtcgaagcacggtaacccaaagaccaccaccgacaaagtatgcaaatacttcatcgaggccgtggaaaacggtaaatacggttggttttggatttgtcctaacggaggtgacaaatgtatgtacagacactccctaccagagggctttgtgctgaaaaccaacgagcaaaagaggctcgagagggagtcgctcgagaaacagccaaaaattacgctggaggagtttatcgaaacagaaagagggaaactagacaaatccaagctaacaccaataacaattgccaacttcgcccaatggaagaaggaccacgtcatcgcaaagattaacgctgaaaagaagttatctagtaagaggaaacctactggtagagaaatcattcttaagatgagcgccgaaaacaagtcatttgagacggacaacgccgacatgccagacgacgtcacccagggatccgcatgggatcttactgaattcacagatgccttgaagaaggctgaccaccaagacgacggcggcatcaaggactacggtgacggtagcaaccccaccttcgacatcaaaaaagccaactccgccacgctcgcatagtctaaaattcatatagactaaactgtatatatgccaccgtatatataatacacgcacacacaccaa

SEQ ID NO: 2906 - DNA, 695 bp, Saccharomyces cerevisiae
ctgaaaggaagaaagatcatcacgaacaacatgtctgctccacaagccaagattttgtctcaagctccaactgaattggaattacaagttgctcaagctttcgttgaattggaaaattcttctccagaattgaaagctgagttgagacctttgcaattcaagtccatcagagaaatcgacgttgctggtggtaagaaggctttggccatttttgttccagtcccatctttggctggtttccacaaggttcaaactaagttgacccgtgaattggaaaagaaattccaagaccgtcatgtcatcttcttggctgaaagaagaatcttgccaaagccatctagaacatctagacaagtccaaaagagaccaagatccagaaccttgactgctgttcatgacaagatcttggaagacttagtcttcccaactgaaatcgttggtaagagagttagatatttggttggtggtaacaagatccaaaaggttttgttagactcaaaggatgtccaacaaatcgactacaaattggaatctttccaagctgtttacaacaaattgactggtaagcaaattgttttcgaaattccaagtgaaactcattagttaatataataatatctaaatctttattattagttagtaacaactttgtttattttatagcacaataagataataaaaactccaaattccaa

SEQ ID NO: 2907 - DNA, 1339 bp, Saccharomyces cerevisiae
atttcgttaagcaatcgaagtaaagtactccatcagaagagtttttaagggatagagtcaataaccaaaatggcgaagattatgatcccagctagcaagcagcctgtttacaaaaaattaggacttcttctggtcgccgtgtttactgtgtatgtgttctttcatggagctcagtatgcgagaggctctgccccaagcccaaagtacagtaccgtgctatcttccggctcgggctataaatactcgaaagtggaactaccaaagtataccggtcctcgggaaaaggccacttttgtcactctagtgcgtaatagagatctatattcgttggctgagtctattaaatccgtggaagatagatttaactccaagttcaactatgattgggtgtttttgaatgatgaagagttcactgatgaattcaaaaacgttacgtcagctttagttagtggtacaacaaaatacggtgtcatcccaaaggaacattggtccttccctgagtggattgatgaagaaaaggccgctcaagtcaggaaggagatgggtgagaagagaatcatctacggtgattctatctcttacagacacatgtgtcgttttgaatcaggcttcttttacagacatcctttgatggatgactacgattggtattggcgtgtggaacctgatatcaagttgcactgtgatatcgactacgatgtcttcaaattcatgaaagacaataagaaaaagtatgcctttgccatttccattaaggagtatgaagctactatccccactttatgggagactactcgtaaattcatggaagcccatcctgagcttatccatgaaaataatatgttagactttgttagcgacgatcagggactttcatacaatttgtgccatttttggtctaattttgaaattgctgctttggatttgtggagatctccagcatactccgcatattttgattatttagatcgtgaaggtggattcttttatgaaagatggggtgatgctccagttcattctattggtgctgcgctgttcttggaccgctctgaaatccatcacttcggtgatattggttattaccatgttccatttcactcctgtccaatagacacaagtatcagactggctaacaaatgtgactgtgatccaagcaaagatttcacatggcacagttattcatgtactactaaattctacaatataaacaagttgccaaagcctgctggttggcaaaaccatatcggttgattatactgtaatcagcccacgttgtctttgtattttccactttttttatttatactatttaaagaaacagaataaattataactcttt

SEQ ID NO: 2908 - DNA, 1227 bp, Saccharomyces cerevisiae
gcttaattaactgctgccacaattgacttcggtttggctatttcacgattgaacaggtaaacaaaattttccctttttagaacgacatgcagggaaataaatcaactataagagagtataagatagtagttgtcggtggaggtggcgttggtaaatctgctttaacaattcaattcattcaatcatactttgtggacgaatatgaccctactatcgaagattcttacagaaaacaagttgtcatcgatgacaaagtatccattttggacattctagatactgctggacaagaagagtattctgcgatgagagaacagtacatgaggactggggaaggtttcctactggtctattccgtcacctctagaaattcctttgatgagttactgtcttattatcagcaaattcaaagagtaaaagattctgactacattcctgtagtcgtggtaggtaacaaattggaccttgaaaatgaaagacaagtctcttatgaagacgggttacgcctggccaagcagttgaatgcaccctttctagaaacgtctgcgaaacaagccatcaacgtagacgaggccttttatagccttattcgtttggtaagggacgacggtgggaaatacaatagcatgaatcgtcaactggataatacgaatgaaataagagattcggagctaacctcatctgcaacagcggatagagaaaaaaagaacaacgggtcttatgtactcgataattctttgaccaatgctggcactggctccagttcaaagtcagccgttaaccataacggtgaaactactaaacgaactgatgaaaagaattacgttaatcaaaacaataacaatgaaggaaataccaagtactccagtaacggcaacggaaatcgaagtgatattagtcgtggtaatcaaaataatgccttaaattcgagaagtaaacagtctgctgagccacaaaaaaattcaagcgccaacgctagaaaagaatctagtggtggttgttgtataatttgttgaaaatgatcctgctctcttgatatgacatggttttgattgcaagtctattcttacttgttcaattggtttcaccagcatctttttgtatccattttcctatgctgtgtatctagtaaaagagttgcttgccaccaaacattaatactaatggttaatctgccaccttttgtaagctttctataatgtacaattgtaatatgttcttttattc

SEQ ID NO: 2909 - DNA, 1998 bp, Saccharomyces cerevisiae
caatccttgttttcggcttataagggtcttctccttaggataatactatcggcacattatcatttagccgcgtagccatggtaaaacattcgttcatagcgctagctgagcatgctagtaaactaagaaggtctatcccacccgtcaaactgacttataaaaatatgctacgggacccatcggtaaaatatagggcgtttgctccaccaaaaatggtcaagaggatttggcctgacaaaactattcaaaaggctccacgttggctgtctactgacttgagggacggtaatcaatctttaccggacccaatgtctgtggctcaaaagaaagaatatttccacaagttgatcaacatcggtttcaaagaaatcgaagtgtctttcccctctgcatctcaaacagatttcgacttcaccaggtatgctgtagaaaacgctccagatgatgttggtattcaatgtcttgtccaatctagagaacacttgattaaaagaaccgtggaagcattgactggtgctaaaagggctaccatacatacttacttggccacaagtgacatgttccgagaaattgtcttcaatatgtctagagaggaagctatttctaaagctgtagaagccaccaaactggttaggaaactaaccaaggatgacccttcccagcaagctactcgttggtcctatgagttttctcccgaatgtttcagtgatacgccaggtgaatttgctgtagaaatttgtgaagctgttaaaaaggcttgggaacctaccgaggaaaatccgatcattttcaacttaccagctactgtagaagttgcctctccaaatgtttacgctgatcaaattgagtacttctctacccacattactgagcgtgagaaggtctgtatttctacgcattgtcacaatgaccgtggttgcggtgtcgccgccacagaattaggtatgcttgcaggcgctgatcgtgtagaaggttgtctatttggtaatggtgaacgtacaggtaatgttgatttggttacagttgccatgaatatgtatacccaaggtgtttctcctaatttagatttctcagatttaacttcaatttctgaaattgtccatcgctgtaacaagattccaattcccccaagagccccatatggcggtgaattggttgtttctgccttttctggttctcatcaggatgcaattaagaagggatttgcaatccaaaacaagaaacaggctcaaggagaaactcggtggagaattccatacttaccattggatccaaaggatattggacgtgattacgaagccgtcatcagagtcaactctcaatccggtaagggtggtgctgcttgggttattatgagatctctaggattagatgtaccaagaccaatgcaagttgatttctccaatactctacagaaaaatgcagatgccttaggaagagagttaaaatccgaagagattacaaaattgttcaaagaaacttacaactacaacaacaatgaacatatatacgtcaccttgttgaattacgaagttaagaaattgaacccagagcgtagagctttagtgggccaggtagaaatcaacgataaggttgtcaacatcgaaggctacggaaatggtcctatctcttctttggtggatgcgctatccaatttactgaatgttaagttgagcgttcaaaactactctgaacattccttgggttctggttctgcaacccaagcggcatctttcataaatctttcctacataaaggacatcaataatcatgctactagtaatatgtggggtgttggtgtctccgaagacactggggatgcatctattaaggcggtatttgctactgtcaataatattattcattccggggatgttctactggcagagtaatagaaaggagtagcttatgattactcatgttatatatatatgtatttttatttataaatggcacagaaaagtaacttatttcacgttaaaaagacatctttcagcg

SEQ ID NO: 2910 - DNA, 3487 bp, Saccharomyces cerevisiae
ccaatatcatattaagaaagctagcagtaccttaagaggaagaaagaaaataactggggcgaagaatatctagttatccactccttcatagaatgattatctttgtttcagaagaacctgaaaggaggctagccattgtatccaacttgtatgctcttgttcttaaaccggttgggaaaaagccatctgataaacccctttgtgccattgaacttcttcaaaaaaatgatttgaaaaaatatggcttcaaaagacttacatcacacgaaatttttggtgttatcggactcattgaggttaatggcctgctgtttgttggtgccatcactgggaaatcaaaagttgcacagccatgcccaggagagactgtgaacaaaatttttgctgtcgattttttttgtttaaatgacaacagttgggattttattgaaatcgactcctcaggttatcctgtgttgccggagactgcttcaactgaatatcaagacgccttgccaaaacatccatgctatgaattgaagaaactattatccaatggatctttttattatagttcagattttgatttgacctcaaccttacagcatcgtggatatggtcagcattctttgagtacagatacctacgaagaagaatatatgtggaactcttttctcatgcaagaaatgatcacatacagagatcatttggacacaaatttgaaacaaatcttggatgacgaggggtttttaacaacagttatccgtggatttgcggaaactttcgtctcgtacgttaagaagttgaaagttgctcttactatcatctcgaaacagagctggaaaagagcaggaacaagatttaatgcacgtggtgtggatgatgaggcaaacgttgccaatttcgtagaaacggaattcattatgtattctagccaatactgttatgcttttacacagattagaggcagtatacctgtattctgggagcaaggtacctctttaatcaatccaagagtacaaattacaagatcatttgaagccacccaaccggtatttgacaaacatatcatgaaatcagtggaaaagtacggacctgtgcatgtcgttaatttgttatcaacgaaatcttctgaaattgaactttcaaaacgatacaaggagcatttaactcattcaaaaaaattgaacttcaacaaagatatatttttgacagaattcgattttcataaagaaacttcgcaagaaggcttttccggtgtcagaaaactcattccattaatattggactctcttttatcttctggctattattcttacgatgttagagaaaaaaagaacatatctgaacaacatggcatatttaggaccaactgtttagattgtttggatagaacaaatttagctcagcaaattatttctttggctgcttttagaacttttctcgaagatttccgattgattagttcaaattcgttcatcgacgatgatgatttcgtttctaaacataacaccctgtgggctgatcacggtgatcaaatttcccaaatatatactggtactaatgctttgaagtcctcattttcaagaaaaggtaaaatgtcacttgctggggcattatcagacgccacaaaatcggtcagcagaatatatattaacaatttcatggataaagaaaagcaacaaaatatcgatactttgttgggaaggttaccgtatcagaaagcagtgcaactttatgatcccgtaaacgaatacgtaagtacgaaattacaaagcatgtctgataagttcacatcaacctccaacattaacttgttaataggatcattcaatgttaatggcgcaaccaaaaaagttgatttatcaaagtggttatttccaatcggtgaaaaatttaaacccgatattgttgttttaggtcttcaagaagttatagaactatctgcgggttcgattttgaacgctgattactcgaaaagctctttctgggaaaacttagtgggtgattgcttaaaccagtatgatgataaatatctgttgttaagagtagagcaaatgacttctttactaattttattttttgttaaagcagacaaagctaaatacgtcaaacaagtggagggtgctactaaaaaaactggctttaggggtatggctgggaataaaggtgcagtgtctataagatttgagtacggtgccacttcattttgttttgtcaattctcatctcgcagcaggagctacgaatgtcgaagaacgtcgaagtgattacgagagcatagttagaggtattactttcactagaactaagatgattcctcatcacgattcgattttctggttaggtgacatgaattatagaataaatctaccgaacgaagacgtcagaagagagttgctcaaccaagaagaaggatatatcgataaactgttgcattttgatcaacttaccctaggtattaattctggcagtgtatttgaaggcttcaaagaaccaactctcaagttccgtccaacatacaagtatgatcccgggacaggaacttatgattcttctgaaaaggaaaggacgccgtcatggacagatagaattatttataaaggggaaaacttacttcctttatcttattcagatgctccgataatgattagcgaccatcggccagtttacgcagcatatagagcaaaaataacttttgttgatgataaagagagactatctctcaagaaacgtttattcacagaatacaaacaagagcatcccgaagaaccgggttctctgatatcggatcttctcagccttgatctggataataagagcactgatggattcaaaagctcttctgaaagttctctacttgatattgatccgataatggcacaaccgacagcgtccagcgttgcttcttcgtcacctgtgtcttcagcatcggcttcactacaacctgtcagaactcaaaacagtagccagtcgcgtacccccataaagaaaccggtattgcgccccccacccccacctgctcataaatctgtatcagcacctgctccttcaacatcgaaggaaaaatcaccaacaccacagacctcaactgcatcgttgtcatctgtgactaaaaatatacaggaaaataaaccattggcgcaaaatagacgaattccaccaccaggttttagtcaaaatatattaactccaaaaagtaccagtaacttggcttcgcctatgtcttctaaggttgatttatataatagcgcgagtgaatctacacgttcagcccaagatgcaagacaacagacacctacagcatttgcagcatcaagagacgtcaatgggcagcccgaagctttgctaggtgatgaaaatccaattgagccagaggaaaaggccaaactaaaccatatgactttagactcatggcagccattgaccccaaaatgagaatatgttatctttgaagtgtggttgttgttccgtttgtatccctttaaatgaacgaagagaaacaaggg

SEQ ID NO: 2911 - DNA, 1505 bp, Saccharomyces cerevisiae
gagtgacttatttgtgcattatagaggtgagaacaaattggaaagttttgattttagtttaagatggccaccttggaagaattggatgctcaaactttaccaggagacgatgaattagatcaagagattttgaatctttcgacgcaggagcttcaaacaagagccaagctcttggacaatgaaattcgtatttttagatctgaattgcaaagactgtcccatgaaaacaacgttatgctcgagaagattaaggacaataaggaaaaaatcaagaataatagacagttaccgtaccttgtggctaacgttgtcgaggtcatggatatgaatgagattgaagacaaagaaaatagtgaatctactacacaaggtggtaatgtcaacttagataacaccgctgttggcaaagctgctgtagtcaagacttcttctagacagactgttttcttgcccatggtcggtttagtagatcctgataaacttaagccaaatgacctggtaggtgtgaataaagactcgtatttgattttggatactttaccctctgaatttgattctcgtgtaaaagctatggaggtagatgaaaaacccacagaaacttactcggacgtgggtgggttggataaacagattgaagagctggtggaggccattgtgttacctatgaaacgtgcagataaattcaaagatatgggaattagagcgcccaagggtgccctaatgtacgggcctccgggtacaggtaaaactttattagctcgtgcttgcgcggctcagacgaatgctacttttttgaagctggcagcacctcaattggtacaaatgtatatcggtgaaggtgctaaactagtccgcgatgcttttgcactggccaaggaaaaggcaccaactattattttcattgacgaattggatgccattggtactaagagatttgattctgaaaaatccggtgatagggaagtgcaaagaaccatgctggaattattgaatcaattggatggctttagctccgatgatcgtgtcaaagtcttggcggctaccaatagagttgatgttttagatcctgctttgttaagatcaggaagattggatagaaaaattgaattcccactcccatccgaagactcgagagctcaaattttacaaattcattcaagaaaaatgaccactgatgatgatattaactggcaagaacttgccaggtctactgatgagtttaatggtgcccagttaaaggcggtaactgtggaggcaggtatgattgccttaaggaatgggcaatcttccgttaaacacgaagatttcgttgagggtataagtgaagttcaagcaagaaaatcgaaatcggtatccttttatgcataaaaataataatattttgatttatcaagccgccattcacatatctacatattagaacaatccttttatttaaagtcgcgtaacttccttattattgatactgtatatggctaattgtatactacttattatttgatgaa

SEQ ID NO: 2912 - DNA, 1125 bp, Saccharomyces cerevisiae
caagctaaaatttggacagctctcattactaaattaagatagaaaaatgcctgctactttacatgattctacgaaaatcctttctctaaatactggagcccaaatccctcaaataggtttaggtacgtggcagtcgaaagagaacgatgcttataaggctgttttaaccgctttgaaagatggctaccgacacattgatactgctgctatttaccgtaatgaagaccaagtcggtcaagccatcaaggattcaggtgttcctcgggaagaaatctttgttactacaaagttatggtgtacacaacaccacgaacctgaagtagcgctggatcaatcactaaagaggttaggattggactacgtagacttatatttgatgcattggcctgccagattagatccagcctacatcaaaaatgaagacatcttgagtgtgccaacaaagaaggatggttctcgtgcagtggatatcaccaattggaatttcatcaaaacctgggaattaatgcaggaactaccaaagactggtaaaactaaggccgttggagtctccaacttttctataaataacctgaaagatctattagcatctcaaggtaataagcttacgccagctgctaaccaagtcgaaatacatccattactacctcaagacgaattgattaatttttgtaaaagtaaaggcattgtggttgaagcttattctccgttaggtagtaccgatgctccactattgaaggaaccggttatccttgaaattgcgaagaaaaataacgttcaacccggacacgttgttattagctggcacgtccaaagaggttatgttgtcttgccaaaatctgtgaatcccgatcgaatcaaaacgaacaggaaaatatttactttgtctactgaggactttgaagctatcaataacatatcgaaggaaaagggcgaaaaaagggttgtacatccaaattggtctcctttcgaagtattcaagtaattgtttttgcgtgtttctcgtatgattgtaatatgtagataaattaaacataagtatatcaaatgtcgatattcttaagactgtttcgtaaatatgttaaataccggatgtgactacatataaaaagtgcgccttttaca

SEQ ID NO: 2913 - DNA, 1758 bp, Saccharomyces cerevisiae
aaaagctgatctaatttttttttgccgtactgtacccttagtcaatccatctatcctctgaacaatgacttcggctgtaccttatgatccatatgatgatctggataacaatccatttgctgagccccaggaggaagattctgaacctgctgcaacaaccacagatggatcatcttctatgtcagaggagcgtgtaggtactgagcaaactgcagcttccgttcaggacaacggaactgcaaataacattcaaaatggtcttggtgaagaaggaaacgcaacacgatcaaaaacttcaaacgaacacaatgaaaaccaacaaccatctcaaccatcagaacgtgttatacttcctgaaagaagtgatgagaaaaaaaaatacactctacttgcaaaagtaacaggattggaacgatttggatctgcaaccggtaagaaagagaatccgactattatatttgattgctccacaaatttgccaacatttcgcaaacaacaatacaagaatgtcaaaaaatcatacgaagaattccaccaattgttcaaatatctgaatgttgccattcaggaatcttttgttcctactcttccctctgcgtatactacattcggaattaatagcgaagaagataggatgaaagtaacgcgaaatttccaactttggtttaacaggctatcgcaagaccccttaattattcggaatgaagaagtggcctttttcattgaaagtgactttaatacgtacacacccatcaacaagtccaaatcactcgcatctgggttgaaaagaaaaacattgaaacaattagcacctccatatgatgaaatcacagaattagcagaattccggccattagtcaagtctatatatgttgtttctcagagcttgcaagaaaaactgctaagagtttccagaaatcgcaagatgatggttcaagaagaaaatgccttcggccaggatttcgttaatctagatgagcacaataaactttacagaagatacggtaaaatattgactgctgtgggtgatattgatagcattatagcaaccatggacatggcgacattgtacgatggtttagagtggattgtcagagatgcttatgccgtgaaggaagcattgaccaacaggcattttatcatgcgaaatctagtacaggcacagcagaattcaaaggcgaaacaggaacaagcacgcaggttccggtcaagaagagatattaaccctatgaaaatcgatgaagcactacgtcagttgaaagctgcagctaaaaacgaacaagttttgacccttaagcttcaacgaatcacgtccaacatgattatcgagagaaaacagtggattagctggtatgaagaatggataagaagctcgatcaaagaatttacactaagaaagatagagtatgaaagaaagaagctgacgttactagaacgagtacgttctgatatcagaaaagctgatgaaaacggaggtttgtcacgtctaggacgccatgctgtctcaaacaacaactccgatacttctcaaacccttaaaggggacagttggacgggagagagcaaccgcaaaagtcaaatccccatcaacaagatcgctcataccgaatttgatgatgaactattcactgaagacgatgggtacaactctcaggactcagacactacatcactgaatgcgcgccatgctgcttcacttttgggcatgtccactaaataatacgtatataaagtagaaaattcatacctttgaacaag

SEQ ID NO: 2914 - DNA, 2777 bp, Saccharomyces cerevisiae
ttaaccccatttgccagaaagccagacctacgcacccaagaatttttaataacagataaaaatggttgctttcactgttgaccaaatgcgttctttaatggacaaagttaccaatgtgcgtaacatgtccgttattgctcacgtcgatcatggtaagtccactttgaccgattccttggtccaaagagccggtattatttccgctgctaaggctggtgaagctcgtttcaccgataccagaaaggatgaacaagaaagaggtatcactatcaagtctaccgctatttctctatactctgaaatgtctgacgaagatgtcaaggaaatcaagcaaaagaccgacggtaactccttcttgatcaacttgatcgactctccaggtcacgttgacttctcctctgaagttactgccgctttacgtgtcactgacggtgctttggttgtcgtcgacaccattgaaggtgtctgtgtccaaaccgaaactgttttgagacaagctttgggtgaaagaatcaagcctgttgttgttatcaacaaggtcgacagagctttgttggaattgcaagtttctaaggaagatttataccaaacctttgccagaactgttgaatccgttaacgtcatcgtttccacctacgccgatgaagttttgggtgatgtccaagtttacccagccagaggtaccgttgccttcggttccggtttgcacggttgggctttcactatccgtcaattcgccaccagatatgctaagaaattcggtgtcgacaaggccaagatgatggacagattatggggtgactctttcttcaacccaaagaccaagaagtggaccaacaaggacactgatgctgaaggtaagccattggaaagagctttcaacatgttcatcttggacccaatcttcagattattcactgctatcatgaacttcaagaaagacgaaattccagttttgctagaaaagttggaaattgtcttgaagggtgacgaaaaggacttggaaggtaaggccttgttgaaggttgttatgagaaagttcttgccagctgccgatgccttattggaaatgattgtcttgcacttgccatctccagtcactgctcaagcctacagagctgaacaattatacgaaggtccagctgacgatgccaactgtattgctatcaagaactgtgatccaaaggctgatttgatgttgtacgtctccaagatggtgccaacctctgataagggtagattctacgccttcggtagagtttttgccggtactgttaagtccggtcaaaaggtcagaatccaaggtccaaactacgttccaggtaagaaggacgatttgttcatcaaggccattcaaagagttgttttgatgatgggtagatttgtcgaaccaatcgatgactgtccagccggtaacattatcggtttagtcggtatcgatcaattcttgttgaagactggtactttgaccaccagtgaaactgctcacaacatgaaggtcatgaaattctctgtctctccagttgtgcaagtcgctgtcgaagtcaagaacgctaacgacttaccaaaattggtcgaaggtttgaagagattgtccaagtctgatccatgtgtcttgacctatatgtctgaatccggtgaacatatcgttgctggtaccggtgaattgcatttggaaatttgtttgcaagatttggaacacgaccacgctggtgttccattgaagatctccccaccagttgtcgcttacagagaaactgttgaaagtgaatcttctcaaactgctttgtccaagtctccaaacaagcataacagaatctacttgaaggctgaaccaattgacgaagaagtctctttggctattgaaaacggtatcatcaacccaagagatgatttcaaggccagagctagaatcatggctgacgactacggttgggatgtcaccgatgccagaaagatctggtgtttcggtccagacggtaacggtccaaacttggttattgaccaaactaaggctgtccaatacttgcacgaaatcaaggattccgttgttgctgctttccaatgggctaccaaggaaggtccaattttcggtgaagaaatgagatctgtcagagttaacattttggatgttactttacatgccgatgctatccacagaggtggtggtcaaatcatcccaaccatgagaagagctacttacgccggtttcttgttggctgatccaaagatccaagaaccagttttcttggtcgaaattcaatgtccagaacaagccgtcggtggtatctactccgtcttaaacaagaagagaggtcaagtcgtttctgaagaacaaagaccaggtactccattgtttaccgtcaaggcctacttgccagttaacgaatctttcggtttcactggtgaattgagacaagctaccggtggtcaagctttcccacaaatggttttcgaccattggtccactttaggttctgacccattggacccaacctctaaggctggtgaaattgttcttgctgctcgtaagagacacggtatgaaggaagaagttccaggctggcaagaatattacgacaaattgtaagaagtctaaatgagaaaaggtggttctgtaagagcaaaccttaccgccttatgatctttttcatttattctctgctttaaaattttgtcgtaataaaaatagtatggtaatagacttatatattattttcttacacatttttgtcatatagttatattccgaatgtttacaatcgaacccatcataa

SEQ ID NO: 2915 - DNA, 1266 bp, Saccharomyces cerevisiae
atgttgagaaatactttttttagaaacacctcgaggaggtttttggctactgtaaagcaaccttcaatcggaagatataccggcaaacctaacccttctaccggcaaatacacggtctcgttcattgaaggtgatggtatcggacctgaaatttccaagtctgtaaagaaaatctttagtgcagcaaacgtccccatagaatgggaatcttgtgatgttagccctatctttgtcaacggattaacgaccattcctgaccctgccgtacaatctatcacaaaaaacctggttgcactaaaaggtccactagctacacctattggtaaaggtcacagatctttgaatttgacattgagaaaaacatttgggttatttgccaacgttcgtcccgcaaagtctattgaaggttttaagaccacttacgaaaacgttgatttagttcttatcagagagaataccgaaggtgaatattctggtatcgaacacatagtttgccctggcgttgttcaatctattaaactgatcacaagagatgcctctgagcgagtcattagatacgcttttgaatatgcaagagccatcggcagaccaagagttattgtggtacataaatctactatccagagattagctgatggtttattcgttaatgttgccaaagaactatccaaagagtatcctgaccttactttagaaactgaacttattgataacagtgtgttaaaggtggtcaccaacccatctgcttacacagacgctgtttctgtttgtccaaatctatacggtgatatcttgtccgacttgaactctggtttgagcgccggttctttaggtttaactccatctgccaatattggtcataaaatctcgatctttgaagctgtccatggctctgcccctgatattgccggtcaagataaagcgaatccaactgccctacttttatcttcagtaatgatgttaaaccacatgggtctaacgaatcatgctgaccaaattcaaaatgcagtattgtctactatcgcatcaggtccagaaaacagaacaggtgacttggctggtactgctactacttcatcattcactgaagcagtcatcaagagattataaaagtcctattcttttccctctcaggttttttcacgccttgaaaacaaatgactatccgtttaatataatgatttctgaaagattatgaagtaaaaaaaagcaaaatgcttagatatataatatatacatacaataaaaattccgtatctactccaa

SEQ ID NO: 2916 - DNA, 1385 bp, Saccharomyces cerevisiae
gtcaattaagtatccttgttcgagagttgttcacagcacactgcgtatatataggcttaccacagttggatttaatcaagcgatataaaagctggaaggagacaagtttcccctaattgttgttctgtttgttacttaccactctatatacgttcgatttcatagaaaatttcttttgcagaccatttattcttcagtttgataatgttaagatctaccgtttcaaaagcttctctcaaaatttgtcgtcactttcacagagaatctattccttacgataagacgatcaaaaatttgctgcttcccaaggacaccaaggtgatctttcaggggttcacaggtaaacaaggtacttttcatgccagcatctctcaagaatatggtacaaatgttgtgggtggtacgaacccaaaaaaggcgggtcaaacacatttaggccaacctgtctttgcctctgtgaaggacgcgattaaggagactggagccactgccagtgccatctttgttcctccaccgatcgcagctgctgccattaaagaatctattgaagctgaaattccgttagctgtatgtatcactgaaggtattcctcaacatgacatgttatacattgcagaaatgttgcagacacaagataaaacaagattagttgggcccaactgccctggtatcattaacccagcaacaaaggtaagaattggtatccagcccccaaaaatttttcaagctggtaaaatcggtattatttccagatcgggaactttgacatacgaagctgttcagcaaactacaaaaactgaccttggtcaatcactggttattggtatgggtggtgatgcttttcccggtactgattttattgacgccttgaaattatttctagaagatgaaactacagaaggtattattatgttaggtgaaataggtggtaaggccgaaatcgaagctgctcaatttctcaaagaatacaactttagcaggagtaagccgatgccggtggcatctttcatcgcaggaactgttgctggtcaaatgaaaggtgttagaatgggtcactccggtgcaattgtagaaggatctggaactgatgcagaatccaaaaaacaagctttgagagatgttggtgttgccgtcgttgaatctccaggttacttaggtcaagctttactggatcaatttgccaaatttaaatgattatattaggaagagaatgaactgctttcaaaagaggaagacttctatgtctcgattattgcttagacaagtatggagctgacatccgttttcttttcagagcttttactcaacattctatgttaatttttccctttgtatatattcatttatccttataaattctactaaaaatcttttaatagtgtttg

SEQ ID NO: 2917 - DNA, 605 bp, Saccharomyces cerevisiae
gcaataccagcatcaacaatagcctattcatgtcgcagaagattggacacagtggcttggcttttgcgcgcctttggcaccatgtcgacgttgcccgtgataagaggacattgggtagattggcttcagcaattgcaattaccttaattggtagacataagccggtctatcatccgtcacaagactgtggagactacgtagtagtgactaattgccaaaaaatccgtgtaacaggtaagaaatttgagcagaagacttactggtctcattcaggtagacctggtcagctaaagttacagacaatgaacaaggttgttgccgataaaggatttggagaaattttgaaaaaagcagttagcggtatgttgcctaaaaataaattgagaaagcaacggttagaccgcttaaaagttttcgatggaagtgaaaacccttataaacaaaatattactgcctttgcccatgagcaatcatcaataccagagcctcttaaagaatcaatttttaaccaattgaaatagcttattgaaattatttgtcatttttttatatatcctttttgcagtcttcaatccatgtatatatttatctgttatgtagtttta

SEQ ID NO: 2918 - DNA, 4783 bp, Saccharomyces cerevisiae
tcacgcaaagttgcaaacatataacaactgtgttagttatcactcgactttgttattctaattataaataaattggcaactaggaactttcgaaaaagaaattaaagacccttttaagttttcgtatccgctcgttcgaaagactttagacaaaaatgcccgaggccaagcttaacaataacgtcaacgacgttactagctactcctccgcgtcttcttctactgaaaacgctgctgatctacacaattataatgggttcgatgagcatacagaagctcgaatccaaaaactggcaaggactctgaccgcacagagtatgcaaaactccactcaatcggcacccaacaaaagtgatgctcagtctatattttctagcggtgtggaaggtgtaaacccgatattctctgatcctgaagctccaggctatgacccaaaattggaccccaactccgaaaatttttctagtgccgcctgggttaagaatatggctcacctaagtgcggcagaccctgacttttataagccttattccttaggttgcgcttggaagaacttaagtgcttctggtgcttccgcagatgtcgcctatcagtcaactgtggttaatattccatacaaaatcctaaaaagtgggctgagaaagtttcaacgttctaaagaaaccaatactttccaaatcttgaaaccaatggatggttgcctaaacccaggtgaattgctagtcgttttaggtagaccaggctctggctgtactactttattaaaatccatctcttcaaatactcatggttttgatcttggtgcagatactaaaatttcttacagcggctactcaggtgatgatattaagaaacattttcgtggtgaagttgtttacaacgcagaagctgatgtacatctgcctcatttaacagtcttcgaaactttggttacagtagcgaggttgaaaaccccacagaaccgtatcaagggtgtcgatagggaaagttatgcgaatcatttggcggaagtagcaatggcaacgtacggtttatcgcatacaaggaatacaaaagttggtaacgacatcgtcagaggtgtttccggtggtgaaaggaagcgtgtctccattgctgaagtctccatctgtggatccaaatttcaatgctgggataatgctacaaggggtttggattccgctaccgctttggaatttattcgtgccttaaagactcaagctgatatttccaatacatctgccacagtggccatctatcaatgttctcaagatgcgtacgacttgttcaataaagtctgtgttttggatgatggttatcagatctactatggccccgccgataaggccaagaagtactttgaagatatggggtatgtttgtccaagcagacaaaccaccgcagattttttgacctcagttacaagtccctctgagagaaccctgaacaaagatatgctaaaaaaaggtattcatataccacagaccccgaaggaaatgaacgattactgggtaaaatctccaaattacaaagagctaatgaaagaagtcgaccaacgattattgaatgacgatgaagcaagccgtgaagctattaaggaagcccacattgctaagcagtccaagagagcaagaccttcctctccttatactgtcagctacatgatgcaagttaaatacctattaatcagaaatatgtggagactgcgaaataatatcgggtttacattatttatgattttgggtaactgtagtatggctttaatcttgggttcaatgtttttcaagatcatgaaaaagggtgatacttctacattctatttccgtggttctgctatgttttttgcaattctattcaatgcattttcttctctgttagaaatcttttcgttatatgaggccagaccaatcactgaaaaacatagaacatattcgttataccatccaagtgctgacgcttttgcatcagttctatcagaaataccctcaaagttaatcatcgctgtttgcttcaatataatcttctatttcttagtagactttagaagaaatggtggtgtattctttttctacttattaataaacattgtcgcggttttctccatgtctcacttgtttagatgtgttggttccttaacaaagacattgtcagaagctatggttcccgcttctatgttattgttggctctatccatgtataccggttttgctattcctaagaagaagatcctacgttggtctaaatggatttggtatatcaatccgttggcttacttattcgaatctttgttaattaacgagtttcatggtataaaattcccctgcgctgaatatgttcctcgtggtcctgcgtatgcaaacatttctagtacagaatctgtttgtaccgtggttggagctgttccaggccaagactatgttctgggtgatgatttcattagaggaacttatcaatactaccacaaagacaaatggcgtggtttcggtattggtatggcttatgtcgtcttctttttctttgtctatctattcttatgtgaatacaacgagggtgctaaacaaaaaggtgaaatattagttttcccacgcagtatagttaaaagaatgaagaaaagaggtgtactaactgaaaagaatgcaaatgaccccgaaaacgttggggaacgtagtgacttatccagcgataggaaaatgctacaagaaagctctgaagaggaatccgatacttacggagaaattggtttatccaagtcagaggctatatttcactggagaaacctttgttacgaagttcagattaaggccgaaacaagacgtattttgaacaatgttgatggttgggttaaaccaggtactttaacagctttaatgggtgcttcaggtgctggtaaaaccacacttctggattgtttggccgaaagggttaccatgggtgttataactggtgatatcttggtcaatggtattccccgtgataaatctttcccaagatccattggttattgtcagcaacaagatttgcatttgaaaactgccactgtgagggagtcattgagattttctgcttacctacgtcaaccagctgaagtttccattgaagaaaagaacagatatgttgaagaagttattaaaattcttgaaatggaaaaatatgctgatgctgttgttggtgttgctggtgaaggtttaaacgttgaacaaagaaaaagattaaccattggtgttgaattaactgccaaaccaaaactgttggtctttttagatgaacctacttctggtttggattctcaaactgcttggtctatttgtcagctaatgaaaaagttggcaaatcatggtcaagcaattctatgtactattcaccaaccctctgctattttgatgcaagaattcgatcgtttactatttatgcaacgtggtggtaagactgtctactttggcgacttgggcgaaggttgtaaaactatgatcgattattttgaaagccatggtgctcataaatgccctgctgacgccaacccagctgaatggatgctagaagttgttggtgcagctccaggctctcatgcaaatcaagattattacgaagtttggaggaattctgaagagtacagggccgttcaatctgaattagattggatggaaagagaattaccaaagaaaggttcgataactgcagctgaggacaaacacgaattttcacaatcaattatttatcaaacaaaattggtcagtattcgtctattccagcaatattggagatctccagattatttatggtcgaagtttattttaactattttcaatcaattgttcatcggtttcactttcttcaaagcaggaacctcgctacagggtttacaaaatcaaatgttggctgtgttcatgtttacggttattttcaatcctattctacaacaatacctaccatcttttgtccagcaaagagatttgtatgaggccagggaacgcccctcaaggactttttcttggatttcatttatcttcgctcaaatattcgtggaagttccatggaatatattggcaggtactattgcttattttatctactattatccaattggattttactccaacgcgtctgcagctggccagttgcatgaaaggggtgctttattttggttgttctcttgtgctttctacgtttatgttggttctatgggtctgcttgtcatttcattcaaccaagttgcagaaagtgcagctaacttagcctctttgttgtttacaatgtctttgtctttttgtggtgttatgactaccccaagtgccatgcctagattttggatattcatgtacagggtttcacctttgacttatttcattcaggctctgttggctgttggtgttgctaacgtagacgtcaaatgcgctgattacgaattgctagaattcacaccaccatccggtatgacatgtgggcagtacatggaaccatatttacaactagcaaagactggttacttaactgatgaaaatgccactgacacctgtagtttctgtcaaatatctacaaccaatgattacttagctaatgtcaattctttctacagtgagagatggagaaattatggtatcttcatctgttatattgcattcaattatatcgctggtgtctttttctactggttagcaagagtgcctaaaaagaacggtaaactctccaagaaataatagaattttgaatttggttaagaaaagaaacttaccaagatggacttttttaataaacatacataatcactacatataggtgcgtaataata

SEQ ID NO: 2919 - DNA, 680 bp, Saccharomyces cerevisiae
tgagtacgtaggagtataagagcgtggggaaacacaaaatgggcaaaaccgcggataatcatggtccagtacgttctgagacagcacgtgaaggaagagaaaaccaggtttactcacccgttacaggtgcaagattagttgctggctgcatatgtttaacacccgacaagaagcaagttctcatgattacttcttctgcacacaagaaaagatggattgtccccaaaggtggcgttgagaaagacgagcctaattacgagacgactgcccaacgagaaacttgggaggaagctggttgcataggtaaaattgtcgccaatttgggtacagttgaagacatgagaccccctaaggactggaacaaagacattaagcaattcgagaactctcgaaaagattcagaagtagcaaagcacccgccaagaaccgaatttcatttttatgaattagagattgaaaatctccttgataaatttccggaatgtcacaaaagacatagaaagctatactcttatacagaagctaaacaaaacttgatagacgccaagaggcctgaattgttggaggcccttaataggtctgctatcattaaagacgacaaatagctagcacatacatatatatgtatatacgtcatggtcgtcaagccaccgcaaacatatttatctattccttcgcaa

SEQ ID NO: 2920 - DNA, 2503 bp, Saccharomyces cerevisiae
acatactttagtcatggctgatagacctgctattcagttgatagatgaagagaaggaatttcatcaaagtgcattacaatattttcaacaatgtattggaaatcgtgatgttggtctagattaccatgtcatctcagttttcggttctcaatcgagtggtaaatcgactttacttaacgtcttgtttaacaccaactttgataccatggatgctcaggtgaaaaggcagcagactactaaaggcatttggttggctcacactaaacaggttaatacaactattgaaatcgataatgatcgtccagatatttttgtgctagatgttgagggctccgatggttcagaaagaggtgaagaccaagattttgagagaaaagccgctttatttgccattgcagtatctgaagttcttatagttaatatgtgggagcagcaaattgggctatatcaaggtaataatatggctttattaaaaacagtttttgaggtcaacctttccctatttggcaagaatgataatgaccacaaggtgctgttactttttgtaattagagatcatgtaggtgtgactccactctcgagtttgagtgattccgttacgagagaattggaaaaaatatggacagagttaagtaaacctgctggttgtgagggttctagcctgtatgattatttcgatttaaagtttgtcgggctagctcataagttgttgcaagaagacaaatttacccaggatgtcaagaaattaggtgattcgtttgtgatgaaaggtacggaaaactattatttcaaacctcaatatcaccataggttgccattagatggttggactatgtacgcagaaaattgttgggatcaaattgaacgtaacaaggatttagatcttccaactcagcaaattctggttgctagatttaaaactgaagaaatatctaatgaagctctagaagagttcatttcaaaatatgatgaatcgattgctcctttaaagggtaacttgggatctttaacatctcagctagtgaagctaaaagaagaatgtctgacaaaatatgatgaacaagcatcgcgctatgcaagaaacgtttatatggagaaacgagaagctttaaatacaaagctgaattcacatatttcaggtacaattaatgagttcttggaatcattaatggaaaagttatgggacgatttaaaattggaggtgtcttctagagacaaagctactacctcttttgtagaaagtgtggcggcaggtaagagtaagattgagaaagaatttaacgaatcaatggagaccttcaaaaagttagggctactaatatcaaacgaagagattacctgcaaattttccgacgatattgaagaaagaatcaagcaactacgtgatgctgaattgaaagcaaaaatcggtcgtattaaaaaaaatctggttcccgaattaaaggatcatgtgattcatttactatcacatccatccaaaaaggtttgggatgatataatgaacgattttgaatctactatcaaagacaatatatctgcgtatcaagtggaaaaagataaatatgattttaaaattggactttcagagagcgaaaacgcgaagatttacaaaaatattagaatattggcgtggagaaccttggataccacagtacatgactacctgaaaatagatacgattgttagtatattgagagacaggtttgaagatgtattcagatatgatgctgaaggttctccaagattgtggaaaacagaagaagagattgatggggcattccgtgttgcaaaagaacatgccctggaagtttttgaggttctttcacttgctgtaacctcagataacgttgaaattattcctgatgtaccaatggctgaagaggaaagcggcgaggacaacgaaatatatcgggacaacgaaggtgtgtttcattcccgtcgtttcgcacacatcttgactgaattgcaaaaggagaatgttttagatcaattccgcaggcagattaacattactgttctggattcgaaaaggtctatcatcactactagaacgcatattccaccttggatttacgttttgctagccgtattagggtggaacgaattcgtggctgtcataagaaaccccttatttgtaacccttaccttgatcttaggtgcaaccttttttgttattcataagttcggcctctggggccctgttgttaatgttgttcaaagtgcagttggtgaaacaagaactgcaataaaggataaactaaggcaatttgtcgttgaagatcatgaagtgaaggaatcttttgaaatgaaagatttctcaaaaaacgagcaaaaagaaaaatgatatgaaaatattttttgatcgaataatttatttcaatttaccgtgtttacttttttgttattatagttattattataattactgttctcctaacgtgtctgtgtgtttgtatataactatagggaactatttatatgacattaaaaatatatgcaaatg

SEQ ID NO: 2921 - DNA, 2531 bp, Saccharomyces cerevisiae
tcaggagtataataacgtcaatatattaaaatgtcttctgtagaagaattgactcagctgttttcacaggttgggtttgaagataaaaaggtgaaggagattgtcaagaataaaaaggtttctgattcactttacaaattgattaaggagactccttcggactatcaatggaacaaatctactagagcgctagtacacaacctggcatcttttgtcaaaggtacagatctacccaagtctgaattaattgttaacggcatcattaatggtgatttgaagacatctctgcaagtcgatgccgcatttaaatatgtaaaggctaatggcgaggcatccaccaaaatgggtatgaatgaaaactctggtgttggtattgagattacagaggatcaggttagaaattacgtcatgcagtacattcaagaaaacaaggaaagaattttaactgaacgctataaactggtgccaggtatttttgccgatgttaaaaacttaaaggagctgaagtgggccgatccacgtagtttcaagccaattatcgaccaagaagtcttaaaacttttgggtccaaaggatgagagagacttaatcaagaagaagaccaagaataatgaaaagaagaaaaccaattctgccaagaagagttctgataattctgcatcatccggtccaaagaggactatgttcaatgaaggtttcctaggtgatttgcataaagtgggtgaaaacccacaagcttacccagaattaatgaaggaacaccttgaggttactggtggcaaagttcgtacaaggttccctccggagcccaatggatatttgcatattggtcattctaaagctattatggttaattttggctatgctaaatatcacaatggtacctgttatttaagatttgacgataccaaccccgaaaaggaagctcctgaatattttgaatccattaagagaatggtttcttggttaggttttaaaccatggaaaattacttactcaagtgattattttgacgagctttatcgcctcgctgaagtgttgatcaaaaacggcaaagcttacgtttgtcattgtaccgccgaagaaattaaaagaggtcgtggtattaaagaagacggtactccaggtggggagagatatgcttgtaagcatcgtgatcagtcgatagaacaaaacctgcaagaattcagagatatgagagatggcaagtacaaacctggtgaagctatcttaagaatgaaacaggatctaaattcaccaagcccacaaatgtgggacttgattgcgtatagagttttaaatgctccacatccaagaacgggaacaaaatggagaatttatcctacttacgattttacacattgtttggtcgattcaatggaaaatattacacattctttatgtactactgaattctacctatctagagaaagctatgaatggttatgtgatcaggttcatgtgttcagacccgctcaaagagaatatggtcgtttgaatatcaccggtacagttttatccaaaagaaaaattgcgcaattggtggatgaaaaattcgttagaggctgggacgatcctagactattcacgcttgaagctatacgcagacgtggtgttcctcctggtgccattttatcctttatcaacacattaggtgttaccacaagtaccacaaacattcaagttgtgaggtttgagagcgctgttagaaagtacctagaagataccacaccgagattaatgtttgtgttggatcctgttgaagttgttgtcgataatttatctgacgattatgaagaattggcaactattccttacagacctggtactccagaatttggtgaaagaactgtaccatttacaaacaaattctacattgaaaggtcagatttctcagaaaacgttgatgataaggaatttttcagattaacaccaaaccaaccagttggtttaattaaagtctcacacacagtttctttcaaaagtttggaaaaagatgaagctggtaaaattataagaattcatgtcaactatgataacaaggttgaagaaggttcgaaaccaaagaaaccaaaaacttatattcaatgggttcctatctcttcaaaatataattctccattgagagttactgaaactagggtttacaaccaattgttcaaatctgaaaatccatcttctcatcctgaaggcttcttgaaggacatcaacccagaaagtgaagtcgtttataaagaatctgtcatggaacataacttcggggacgttgtcaagaacagtccatgggtcgttgattctgttaaaaactcggaattttatgttgaagaagataaggattccaaagaagtgtgtagattccaagctatgagagtaggttatttcactctggataaagagagtacgacttctaaggttattttgaatagaatagttagcttgaaggacgcaacttccaagtgaatgatttaatgtgcatatatgtatatatttatatatatatcctattggttgaaaatgatgtaatagtgtaa

SEQ ID NO: 2922 - DNA, 1196 bp, Saccharomyces cerevisiae
gccagccttttcaaagaaatgcgaaaaaatagtgcattaccacctacgtaaggtaggctggagaaaaagataaacttttgcattctctgctcaccataccgcgaaggaaagtagttataacgtgtcccgttttcaacaaggttttctggtatattgttaacggtggagaaagcatctagtatcaattacttccagagtacacacaacgaatgttatgtctgtccaagatactaaagcggtagagttttctatgggtcacatcagatcatcctctgtatccctggtagcagaggctacttcaaacacgaatagtgaagacaaattatctaaggtccaactctacgaagatttgtgccggtacgaggatacattgagtaagttggtggaatctgtagatcgtttcaaaccaaaccttgatattgccaaggatttgatcagaactgatgaggccttgtttgaaaacgtcaaactgttagctgaatatgacaatatctaccgcaacttacagaagattgacaaagactctgaagaactagattctaaaaccaggaagatattggaaattctaaatgaatgtcatgacgagttaaaagcactaccgatgcttgaacaagtagagttcgagaaaaacacaattttacagcaaagatcgaaaatcaattcgacagagttgttggattatgccaccaaactctccaagtttaccaaaataccaccaacgttcgacaagggagctgtgggacccaacaattttatatggcccgcagaggatgccctacgaagaggaatgcttgctatggcctcattacatagtaaagagctaactagaatacccggtgaagaagtagaagaaacagaagtaccgaccgtaccgccatctcaaagtgaagaacaaaaagggcagatggccaagaaagaaggtacaccaaagacagactcgtttatatttgatggtactgctaaagaagttggtgatgaggcagacaataccaaagataaagaaaaggaagaaaataatgatgatgccctagatcttgatcttgatctgtttgatccggacgacttctagttgcagtgtcttgaatctcttcctcgttaggaatgaagaaaaaaaaaagttagacaataattcgtgtaggtaaaagcgtatataaaattacatatataatttactgcaatatgtcaaagtgtatgaa

SEQ ID NO: 2923 - DNA, 1414 bp, Saccharomyces cerevisiae
acaagcgtaaattctcgtgttccacttgagtcggtttacaagaagtacagaaatatttaacacatacctgctatttggacaaatttagcagtaaaaaaaagaacgtttaaagaatgctttccagaacaatccgtacacaaggttccttcctaagaagatcacaactgaccattacaagatcattttcggttacattcaacatgcagaatgcacaaaagagatcacccacaggaattgttttgatgaacatgggtggcccctctaaagttgaggaaacatatgattttttgtatcaattatttgccgataatgacctaattcccattagtgctaagtatcagaagacaattgctaaatatattgctaagtttcgtacccccaagatagagaagcaatatagggaaattggtgggggctccccaatccggaaatggtctgagtatcaagccactgaggtctgtaaaatcttagataaaacctgtccagaaacggcgcctcataagccttacgtggcgtttcgttacgcaaagccgctaaccgcagaaacttataaacaaatgctaaaagatggcgtgaagaaggcagtggccttttctcaatatcctcatttctcttattccactaccgggtcatccatcaacgaattgtggagacagattaaggcattggactccgagagatctatatcttggtcggttattgatcgttggcctacaaatgaaggtctaatcaaggccttctccgaaaatatcaccaaaaaactacaagagtttccgcaacctgtcagagacaaggttgttttattgttttccgcacattctctacccatggatgttgttaacaccggtgatgcctacccagctgaggtagctgcgacggtttacaacatcatgcaaaaattaaagtttaaaaacccttataggttggtttggcaatcccaagttggaccaaaaccatggttgggagcgcagacagctgaaattgcggaatttttaggccccaaagttgatggcctaatgtttattcctatcgcctttacctctgatcatattgaaacattgcatgaaattgacttaggcgtcattggggaatcggaatataaggataaatttaagagatgcgaatctttaaatggcaaccagacctttattgaaggcatggcagatctcgtcaaaagccacttacagagtaaccaactctattctaatcaactacctcttgattttgcacttggcaagtccaatgatcctgtaaaggacctttcattggtatttggcaatcacgaatctacttgataagggccattcatcccacaatctcaatatcagtatattctcttatttattaattgaggttgcgtatttatgttttctttgtggtatataatatatcattatttattgcattttaaaac

SEQ ID NO: 2924 - DNA, 1286 bp, Saccharomyces cerevisiae
atgtctttggaaagagaggaaccacaacatttcggagcagggccagctcaaatgcctacaccagttttgcaacaagctgctaaagacttaatcaatttcaatgacataggtttgggtatcggtgaaatttctcaccgttcgaaggatgccaccaaagtgattgaagactctaagaagcacttaatcgaactgctaaatattcctgacactcatgaagtgttctacttgcaaggtggtggcactactggtttttcttccgttgctactaatttggcagctgcatatgtgggtaagcatgggaagattgcacctgccggttatttagtcaccggtagttggtctcagaaatcttttgaagaggcaaagagattgcacgttcctgctgaagttatcttcaacgctaaagattataacaatggcaaatttggtaaaattccggatgaatccctttgggaagataaaatcaaaggtaaggctttctcatacgtgtacctatgtgagaatgaaactgttcatggtgttgaatggccagaattaccaaaatgtttagtaaacgaccccaacatcgaaattgttgctgacttatccagcgacattttgtctcgtaagattgacgtttctcaatacggtgtcatcatggcaggcgcccaaaaaaacattggtttagcaggcttaaccctatacattatcaagaaatccatccttaagaatatttctggcgcttctgatgaaacattacatgaattgggagtaccaatcacccctattgcattcgactatccaacggtggtgaagaacaactcagcctataatacaattccaattttcactttacatgttatggatctcgtgttccaacatattttgaagaagggtggtgttgaagcgcaacaggctgaaaatgaagaaaaggccaagatattatatgaggcattggatgcaaattcagatttttacaacgttccagtggatccaaagtgtagatcaaaaatgaatgtcgttttcacccttaaaaaggacggccttgatgaccagtttctaaaagaggcagctgctcgtcatttaaccggtttgaaaggacatcgttcagttggtgggttcagagcctccatctataacgcgctttcagtgaaagctgtacaaaacttggtagattttatcaaggaatttgctgagaaaaacgcttaatatcagcggaatatgcctgtaatttggttcaaagaaaaactttttcaagtcatatgtaagttttaaataaatcagtttacgaacatgcacaagaataa

SEQ ID NO: 2925 - DNA, 1509 bp, Saccharomyces cerevisiae
aatttgagcttctttgttgtaaactattttgtgctttcagttttattctagctcgacaaaggtaacagacaaaaatgtcagctttattaccaagattactcacaagaacagcttttaaagcttctgggaaacttctgaggctctcttcagtaatttctaggaccttttctcaaactactacttcctatgcagctgcttttgatcgttccaaaccgcatgtaaatataggtacgatcggccatgttgatcatgggaagacaactttaaccgcagccattacgaaaacgttagccgcaaaaggtggtgccaacttcttggactatgctgccatcgataaggctccggaagaaagagctcgtggtattacaatttctactgcacacgtggaatacgaaacggccaagagacattattctcacgtcgactgtccaggccacgctgattacatcaagaatatgattaccggtgctgctcaaatggatggtgctatcattgttgtagctgctaccgatggacaaatgccccaaactagagaacatttacttttggccagacaagttggtgtccaacatattgtcgtttttgttaacaaggttgataccattgatgatccagaaatgttagagttagtcgaaatggaaatgagagaacttttaaacgaatatgggtttgacggtgataatgctccaattatcatgggttctgccctttgcgctttggaaggtcgccaacctgaaattggggagcaggccatcatgaaacttttggatgcagtggatgagtatattcctacacctgaaagagatttgaacaagcctttcttgatgcccgttgaagatatcttctctatctccggtagaggtactgtggtcactggtcgtgtggaaaggggtaatttaaagaaaggtgaggaattggaaattgttggtcacaactccaccccattgaaaacaacagttactggtattgaaatgtttagaaaggaattggactctgctatggcaggtgacaatgccggtgttttacttagaggtatcaggagagatcaattgaagagaggtatggtcttagctaagccaggtaccgttaaagcccatacaaagattctagcctctttgtacattttatccaaagaggaaggtggtagacattctgggtttggtgaaaactacagaccacaaatgtttataagaacagctgatgttacagttgtgatgagatttcctaaggaggttgaagatcattctatgcaagttatgccaggtgacaatgttgaaatggaatgtgatttgatccatcctaccccattagaagttggtcaacgtttcaatatcagagagggtggaagaactgttggtaccggtctaatcacacgtattattgaatagacttattgatgcaactggagtatatttctatatattctgttcatttcccctctcataatatatacttgtttcgttaaaattttatacgtgtaaataaagtgccataaatttttcagcttta

SEQ ID NO: 2926 - DNA, 1369 bp, Saccharomyces cerevisiae
cgactagatttacaatcatgtatccaggtagtggacgttacacctacaacaacgctggtggtaataatggctaccaacggcccatggctcctccacctaaccagcagtatggacagcaatatggtcagcaatatgaacagcagtatggacagcaatatgggcaacaaaatgatcagcaattcagtcagcaatatgctccaccaccaggtcctccccctatggcttataacaggcctgtgtatcccccccctcaattccagcaggaacaggcaaaggcacaattaagcaacggctacaacaatcctaatgtaaacgcatccaatatgtacggtccaccccagaatatgtcattacctccacctcaaacacaaactattcaaggtacagaccaaccttatcagtattctcaatgtactgggcgtagaaaggctttgattatcggtataaactacataggttcaaaaaatcaactgcgtggttgtatcaatgatgctcataacatcttcaactttttgactaatgggtacggttacagttcagatgacattgtcatattaactgatgatcagaacgatttggtcagggttcccactagggctaatatgattagggccatgcaatggttggtcaaggatgcgcaacccaatgattctttgttccttcattattctggacatggtggccaaactgaagatttggatggggacgaagaagatgggatggatgatgttatatatccggtcgatttcgaaactcaagggccaattatcgacgatgaaatgcacgatataatggtgaagcccttacaacaaggtgttagactaacagcattgtttgactcttgtcattcgggtacagtgttggatcttccatatacctattctactaagggtattattaaggagcccaatatttggaaggatgttggccaagatggcctgcaagcagctatttcatatgccacaggaaacagggctgctttgattggttctttaggttctatattcaagaccgttaagggaggtatgggcaataatgtggatagagaacgcgtgagacagatcaaattctcagcagcagatgttgttatgttatcaggttcgaaggataatcaaacttctgcagatgctgtcgaagatgggcaaaatacaggtgcaatgtcccacgccttcatcaaggttatgactttacaaccacagcaatcatatttatctcttttacagaacatgaggaaagaattggctggtaagtattctcaaaaaccacaattatcatcgtcacaccctattgacgtaaatctgcaatttattatgtagaaatatatgaatgtgtacgttggtagatgtattcagactggtgtagtatgtga

SEQ ID NO: 2927 - DNA, 755 bp, Saccharomyces cerevisiae
gaaggcaaagatgacagagcagaaagccctagtaaagcgtattacaaatgaaaccaagattcagattgcgatctctttaaagggtggtcccctagcgatagagcactcgatcttcccagaaaaagaggcagaagcagtagcagaacaggccacacaatcgcaagtgattaacgtccacacaggtatagggtttctggaccatatgatacatgctctggccaagcattccggctggtcgctaatcgttgagtgcattggtgacttacacatagacgaccatcacaccactgaagactgcgggattgctctcggtcaagcttttaaagaggccctaggggccgtgcgtggagtaaaaaggtttggatcaggatttgcgcctttggatgaggcactttccagagcggtggtagatctttcgaacaggccgtacgcagttgtcgaacttggtttgcaaagggagaaagtaggagatctctcttgcgagatgatcccgcattttcttgaaagctttgcagaggctagcagaattaccctccacgttgattgtctgcgaggcaagaatgatcatcaccgtagtgagagtgcgttcaaggctcttgcggttgccataagagaagccacctcgcccaatggtaccaacgatgttccctccaccaaaggtgttcttatgtagtgacaccgattatttaaagctgcagcatacgatatatatacatgtgtatatatgtatacctatgaatgtcagtaagtatgta

SEQ ID NO: 2928 - DNA, 2558 bp, Saccharomyces cerevisiae
acaagaaaagcatttcatattatggctgaactgagcgaacaagtgcaaaatttaagcatcaacgacaacaacgagaatggttatgttcctcctcacttaagaggaaaaccaagaagtgccagaaataacagtagcaactacaataacaacaacggcggctacaacggtggccgtggcggtggcagcttctttagcaacaaccgtcgtggtggttacggcaacggtggtttcttcggtggaaacaacggtggcagcagatctaacggccgttctggtggtagatggatcgatggcaaacatgtcccagctccaagaaacgaaaaggccgagatcgccatatttggtgtccccgaggatccaaatttccaatcttctggtattaacttcgataactacgatgatattccagtggacgcctctggtaaggatgttcctgaaccaatcacagaatttacctcacctccattggacggattgttattggaaaacatcaaattggcccgtttcaccaagccaacacctgtgcaaaaatactccgtccctatcgttgccaacggcagagatttgatggcctgtgcgcagaccggttctggtaagactggtgggtttttattcccagtgttgtccgaatcatttaagactggaccatctcctcaaccagagtctcaaggctccttttaccaaagaaaggcctacccaactgctgtcattatggctccaactagagagttggccacccaaattttcgatgaagccaagaaatttacttatagatcctgggtcaaggcctgcgtcgtctacggtggttctccaattggtaaccaactaagagaaattgaacgtggttgcgatcttttagtcgctactccaggtcgtttgaatgacttgttggaacgtggtaaaatttctttggccaacgtcaagtatttggttctagatgaagctgatagaatgttggatatgggtttcgaacctcaaattagacatattgtcgaagactgtgatatgactcctgttggtgaaagacaaactctgatgttctcagctacttttcccgctgatatccaacatttggcccgtgatttcttaagtgactacatctttttgtctgttggtagagtcggttctacttcagaaaacattactcaaaaagtcttatacgttgaaaatcaagataagaagtcagccttattggatctattgtctgcatccactgacggtttgactttgatctttgtcgaaactaagagaatggcagatcaattgaccgatttcctgatcatgcaaaactttagagctaccgccattcatggtgaccgtacccaatctgagagagaacgtgccttggccgccttcagatctggtgccgctactttattggttgccacagctgtcgcagctagaggtctagatattccaaacgtcacccacgttatcaactacgatttaccaagtgatgtcgatgattacgtccatagaattggtagaactggtcgtgccggtaacaccggtcttgccactgcctttttcaacagtgaaaacagtaacattgttaaaggtttgcatgaaattttgactgaagctaaccaagaagtcccatcattcttgaaggacgctatgatgagtgctccaggtagcagaagcaacagccgtagaggcggtttcggtcgcaacaacaacagagattaccgtaaggccggaggcgctagcgcaggcggctggggctcttcaagaagcagagataactctttcagaggcggtagtggctggggtagcgattccaagtcttctggctggggtaacagcggtggttcaaacaactcttcttggtggtgatttcagacaaactagggtgaggattcttcgttttctgctctagcatgtcttatattttctttctccaatcactttttttatccaagtcctgaaaatactgtgttgtttgtttctctctagccgttgattggccccatattttttttattttctcactgggagccactaatctgttactttttttccactcttattttttatccatcgtttttttgttttttttttctttcatggttctaatattattttacaattgtactataaaatgcctttgctaatattaactaaaaaactaaagatttcactatgattataagcaattaagattttcatcttttagtgaaaagatgaaggaattattatctacttttactatattttccactatttttgcttaattgctttaaccgatctattcattggactgattatttacattatcttttatttccacttccactttttcagttttcttcgaatagagactttattttgaacagttttttcgaccttttttgtttgttattgtttctttttaccttacgaaaatattcttactgttcacagtaccattgtataatagtattcatttccttcctacattttctctcccttttttgagttgaggcctttttattgactcgccttatactctactttatttgtgttttgtagatagaataaacatcaacagtataattcataatactttctattgctta

SEQ ID NO: 2929 - DNA, 2229 bp, Saccharomyces cerevisiae
tagagaaggtcaacaatagaataagtggagatgggtaaagtttctaaatcgaccaagaagtttcaatcgaagcatttgaagcatactctagaccaaagaagaaaggaaaagatccaaaagaagagaatccaaggccgtcgtggcaacaaaactgatcaggaaaaggccgatgctgctggtactagggaacaacagcagttgaaaaaatctgcaaaggaagaggtttttaaggacatgtctgtcgaaactttttttgaaaagggcatcgaaattccaaaagagaataaaaaattgaagaaaaaaactacgaaagagcaatctgatgaagattcctcctcttccgaagaggaggaagacatgggacaaagcatggcaaagttggccgaaaaggatcccgaattttataagtatttggaggaaaatgataaagatttattggacttcgcaggtaccaatccattggatggaattgatagtcaagatgaaggtgaagatgctgaaagaaacagtaatattgaagaaaaatctgaacaaatggagctggaaaaggaaaaaattgagctttctttgaaattggttaggaaatggaaaaaacaacttcatgattctccaagcttaaaattactaaggaacataatcagtgctttcaaggttgctgtaaatttgaacaaggaagaaaacatcgaagactataaatatgctatcactgatgagaaagcattccacgaattgatgttcatggtcttgaaagatgtaccacaagcgattcaaaagatggccccatacaagattgtaaaaggcgcaaggaccttaccaaatggaggtaacgtctccagggtctcgtccattgtcaagtcgcatgctggctctttgttgattttattgaatgatattactaatacggaaacagcagcattagttcttcattctgtcaacgaattgatgccttatcttttatcatacagaaggatcttaaaggagcttattaaatcaattgttggagtatggtctacaacgagagaattagaaacccagattgcttcttttgcctttttgatcaataccaccaaagagttcaagaagtctatgctagaaacaaccttaaaaacaacgtactccacttttatcaaaagttgtcgtaaaacgaatatgcgttctatgccactgattaattttcaaaaaaattcggcagctgaattgttcggtatcgatgaagttctaggttaccaagttggatttgagtatattaggcaattggcaattcatttaagaaatacaatgaacgcgacaactaaaaaatccagtaaaattaattccgcagaagcttacaagattgtatacaactggcaattctgtcactccttggatttctggtctcgtgtactatcgtttgcttgtcaaccagaaaaggaaaatggcagtgaatctcctttacgacaattaatttacccattggttcaggttactttgggtgtaatcagattaatcccaacaccacaattcttcccattaagattttatttgattaaatcacttattagactttctcaaaatagtggtgtttttattccaatatatcctttactttctgaaattttaacctcaacggctttcactaaggcacccaaaaagagccctaacttggctgctttcgattttgagcacaacatcaaatgtacgcaagcttatctgaatacaaaaatataccaagagggtttgtcagaacagtttgtggacttattgggcgattattttgctctgtactgtaaaaacattgcatttcctgaacttgtaacaccggttattatctctttacgccgttacatcaagacttcaactaatgtcaaacttaacaaacgtttatcaactgttgtagaaaaattgaaccaaaacagcacattcatccaagaaaagagatcagatgttgaatttgggccaacaaacaaatctgaagtttcaagatttttgaatgatgtagcttggaataaaacacctttaggttcttatgttgcagtacaacgtgaagttaaggaagaaaaggccagattaatgagagaaagtatggaagaacaagacaaagaaagagaaacagaagaagcaaaattattaaacagtctggaaagtgatgatgacaacgaagatgttgaaatgtcagacgcttaacaactcagcaagatttgattttttgtcttgaattcaatagttaagtctataaatgtgtaaaataaa

SEQ ID NO: 2930 - DNA, 538 bp, Saccharomyces cerevisiae
gtaaacctcaataagcaaaataataatacaaaatgattgtcccagtcagatgtttctcatgcggtaaagttgttggtgacaagtgggaaagctacttaaacttgttgcaagaagatgagttggatgaaggtactgcattgtcaagattaggtctaaaaagatactgctgtagaagaatgattctaacccacgtcgatcttattgaaaagtttttaagatacaacccattagaaaaaagagattaagtgttcctcaatatggctgtttttgaacttttcttttccttgatggatgaaaaaaaaaagatgagagcggtcatgaatatagaaacgataaccatttattctcacacactaaaagaactacacgacaaccagatgtgtctctgcatactgtaggaataccattctcttccaaaataatagaaaataatatatatatatcttttgtttactcttcaagacgataaaggaagtatgtagatgttacatcgtgcgatataagagacttgtatactataagaaagagcttagatgaa

SEQ ID NO: 2931 - DNA, 1560 bp, Saccharomyces cerevisiae
ctgtaaagcacattttattcataatctcctttgtgccagaactcaaggtcaataggccagaattattggaaggaaagagggaagaaaatacgatattgctagttcattaagtcaaggaagaaaatactcaaaaaactgtacagctcaatcaggtacacattacgatggcagcacatcagatggactcgataacgtattctaataatgtcacccaacagtatatacaaccacaaagtctacaggatatctctgcagtggaggatgaaattcaaaataaaatagaggccgccagacaagagagtaaacagcttcatgctcaaataaataaagcaaaacacaagatacaagatgcaagcttattccagatggccaacaaagttacttcgttgaccaaaaataagatcaacttaaagccaaatatcgtgttgaaaggccataataataaaatctcagattttcggtggagtcgagattcaaaacgtattttgagtgcaagtcaagatggctttatgcttatatgggacagtgcttcaggtttaaaacagaacgctattccattagattctcaatgggttctttcctgcgctatttcgccatcgagtactttggtagcaagcgcaggattaaacaataactgtaccatttatagagtttcgaaagaaaacagagtagcgcaaaacgttgcgtcaattttcaaaggacatacttgctatatttctgacattgaatttacagataacgcacatatattgacagcaagtggggatatgacatgtgccttgtgggatataccgaaagcaaagagggtgagagaatattctgaccatttaggtgatgttttggcattagctattcctgaagagccaaactcagaaaattcttcgaacacattcgctagctgtggatcagacgggtatacttacatatgggatagcagatctccgtccgctgtacaaagcttttacgttaacgatagtgatattaatgcacttcgttttttcaaagacgggatgtcgattgttgcaggaagtgacaatggtgcgataaatatgtatgatttaaggtcggactgttctattgctactttttctctttttcgaggttatgaagaacgtacccctacccctacttatatggcagctaacatggagtacaataccgcgcaatcgccacaaactttaaaatcaacaagctcaagctatctagacaaccaaggcgttgtttctttagattttagtgcatctggaagattgatgtactcatgctatacagacattggttgtgttgtgtgggatgtattaaaaggagagattgttggaaaattagaaggtcatggtggcagagtcactggtgtgcgctcgagtccagatgggttagctgtatgtacaggttcatgggactcaaccatgaaaatatggtctccaggttatcaatagcttcgaattggaaatactgtgagcagtaattatcaatggatgctattatataaatatacatacctacacccatcccatatttacatagaataacaacagtaacattagttctgtggaagcgcaa

SEQ ID NO: 2932 - DNA, 2889 bp, Saccharomyces cerevisiae
caataaggaattgggtatctcgcagttaattttataacttcaagtcacttcataataaactaagctgaagaaaatggtcaatatttctgatttctttggtaaaaataagaaatccgtaagatcgtcaacatccagacctacgagacaggtgggttcgtctaaaccagaagttatcgacttagatactgaatctgaccaagaatcaaccaataaaacaccaaagaagatgcctgtaagtaatgtaattgatgtatcagagacacctgaaggagaaaaaaagctacctcttcccgctaagaggaaggcctcttcaccaactgtaaagccagcaagttcaaaaaaaaccaaaccctcctctaaaagttcagactcggcttcgaatattacggctcaagatgtactagataagattccatccttggatctgtcaaatgttcatgtgaaagagaatgctaaatttgatttcaaaagcgcaaattcaaatgcggatccagatgaaattgtttctgaaataggtagttttccagaaggaaagccaaattgtttattaggtctaacaattgtcttcacaggtgttctgccaaccttggagcgtggtgcatcggaagctttagcgaaaagatacggagcaagggttactaaatcaatttcaagcaaaacttctgtagtagtcttaggtgatgaagcagggccaaagaaactagaaaaaatcaagcaattgaaaatcaaagccatagacgaagaaggctttaagcaattaattgctgggatgcctgctgaaggtggtgacggggaagctgccgaaaaagcacgtcgaaaattagaagaacagcataatattgctaccaaagaagcagaattgcttgttaagaaagaagaggaaaggtcgaagaagcttgcagccactagagtttctggtggccatctggagagagacaatgtggttagggaagaagataaattgtggacagtaaagtacgcaccaacgaatctacaacaggtctgtggtaacaaaggaagtgtaatgaaattaaaaaactggttggctaattgggaaaattcaaagaaaaatagttttaaacatgctggtaaagatggctctggtgttttcagggctgcaatgttatacggtcctcctggtattgggaagacaactgctgctcatttagttgcacaagagcttgggtatgacattcttgaacaaaacgcttctgatgttcgctctaaaactttacttaatgccggtgttaaaaacgctcttgataacatgtctgtagtgggatatttcaaacacaacgaagaagctcaaaatttgaacgggaaacattttgtcattatcatggatgaagttgatggtatgagcggaggcgatagggggggagttggccagctggcacagttttgtcgtaagacgtcaactccattgattctaatttgtaatgaacgtaatttaccaaaaatgagaccattcgatagagtatgtcttgatatccaatttagaagacctgatgctaacagtatcaaatcaagattaatgacaattgcgatcagagaaaagttcaaacttgatccaaatgtcattgataggttgatacagactacaagaggtgatatccgccaggttattaatctactttcaacgatatctacgactactaaaaccataaaccatgaaaatatcaacgagatctcaaaggcatgggaaaagaatattgccctaaaaccctttgacattgcccataaaatgttggatggacaaatatactcagacataggttcaaggaactttacactgaatgataagatcgcattatattttgatgactttgatttcacacccctaatgattcaggaaaactatttatctacaagaccaagcgttttgaaacccggccagtcacatttggaagcagttgctgaggcggctaactgtatttcattaggtgatattgtcgaaaagaagattcgtagtagtgagcaattatggagtcttttgcctttgcatgctgttctttcatctgtttatccagcatcaaaagttgccggccatatggcgggaagaatcaatttcacagcttggttgggccaaaattctaaatctgccaaatattataggttactgcaagagatacattatcatacaagactaggtacatctactgataaaattggactaaggctggattacctaccaacttttagaaaaagattattggacccatttttgaagcaaggtgctgatgcaatttcatctgtcatagaggtaatggacgattactatttgaccaaagaagactgggattctattatggagtttttcgtaggtcctgatgtgaccacagccattatcaaaaagataccagctacggttaaaagtggattcacgcggaaatacaacagtatgacacatccagtcgcaatttacagaacaggtagtactattggtggtggtggtgttggcaccagtactagcacccccgatttcgaagatgtcgttgacgcagatgacaatccagttcccgcagatgatgaagaaacacaagatagtagcacagacttgaagaaggataaacttatcaagcagaaagccaaacctacgaagaggaagactgccaccagtaaacctggtggtagcaaaaaaaggaaaacgaaagcatgatttattcatacactaagattataattacacttttcttctcattgattttgtgagccgttctatcacagatacgaaaactgtgtggtgataatagctcgatgggtatcatcaccgccctatataaaatactcttattagtatagtacacaaaataatgtacctgtacgtacaaccgtcgttaaatattacatttattaggtctaacatttgtacctaatatgtcattccaa

SEQ ID NO: 2933 - DNA, 997 bp, Saccharomyces cerevisiae
aaaaaagatacattagcgttagaaaatcgggaattatggcaaaccaaaagcaaatgagaactcaaatactaatcacggacattcctagtggcaaatttactagtaaatggcctacacaactggaaaaaactttattcaaggagcaatttccaaatttacaaagtcacttgcagtattacacgccgttgccatttttaaacagaattataatcatatttgataatgaagatgacacgctgcaagtgtttaagttcttacaggaattgttagctaaggagaatagcggtccgatgaagttatttgtaactgagtcccttttaaataatcaacatccgcgatctcgttccacggatgatgctgtttcgttgcaagataataacttggcacttttggaggatcatcgcaacaaaccgctcttatctattaatacagatccaggagtcactggagtagacagttcatccctcaataagggaggctcttcattatctccggataaatcatctctagaatcgcccacaatgttgaagctttcgacggattcaaagccatttagttaccaagaaccgctaccaaagctttctaggtcgtcttcttcaacttcgaacctctcattgaacagaagttcacagacatcattaccttcacaactagaaaataaggataagtcagcgtcaggcaccaaatgccttttcgcctctaagccactaggattgaccattgatacttctactagaagtaatgctgcatcgtgtaccgaaaatgatgtaaacgctactgcctcaaatcctccaaaaagtccaagcataacggttaacgagtttttccattagagcactagagcataactaatactataaattagacaaagcagaaaaagggaaaaaggttcatgctatgataatgtaaagaatatgcgtagagatatctatatatccatttatacgtttatatacttgcgtgtttactttgtatggcataataacatgtatgtttg

SEQ ID NO: 2934 - DNA, 1434 bp, Saccharomyces cerevisiae
acgtgtgtttactgttttagaagatcggcatttatcaaatgtaaggacaatgagacatggttgaccaattagttcttctcagataggagttctagttcttctgcatactacttagtcctcttctgtcgttgacattcaattgcttgtgcatttctaacatgaaatagtggtactacgaatgctattattctatgccaggcaaattcctctggaactttttttttttcagttttttcgtggtgagctttttttgcctgtctatctcgaaagatcttgttgttgatgactcagtgcagtcgcgatcactttcgactcgacatgcatttgcaagtaattctgttataaaacgttctcttcgttttttcagtctgaagctcttctgcacttttttactgggttagattctatatagtcaagtaattcgaggtagcatcaaagtaatatgtcatcagactcaaacgcaaagccattgccttttatatatcagttcatatcaggtgccgtcgccggtatttctgagttaactgttatgtatccgcttgatgttgttaagacaagatttcaactggaggtgacgacgcctactgccgctgcagtaggaaagcaagtagagagatataatggtgtcatcgattgtttgaaaaaaattgtaaagaaggaagggtttagcagactttacagaggtattagttcaccaatgttgatggaagcaccaaagagagccaccaaatttgcatgtaacgatcaatatcaaaaaatcttcaaaaacctattcaacacgaatgaaactacgcagaagatctccattgcggctggtgcatctgctggtatgacagaagctgcagttattgttccatttgaattgatcaaaatcaggatgcaagacgtcaagtccagctatcttggaccaatggactgtttgaaaaaaacaatcaaaaacgaaggtattatggggctatacaagggtatcgaatctaccatgtggagaaacgctctttggaatggtggctacttcggtgttatctaccaagtgagaaattccatgcccgtagcaaagacaaagggacaaaagaccagaaatgaccttattgcaggtgcgatcggtggtacggtcgggaccatgcttaacactccctttgacgtggtgaaatccagaatccaaagtgtggacgcggtcagcagtgctgttaaaaaatacaactggtgcctaccttcgctattggtcatataccgtgaagaaggcttcagagcattgtacaaaggtttcgtccccaaagtatgtagactagcacccggtggttcattaatgttggtggtttttaccggtatgatgaactttttcagggatctgaagtacggacactgatatttattgtatatagaatacctctttcctcttcaatcttaactacgttatttctacgtcaaaataag

SEQ ID NO: 2935 - DNA, 1541 bp, Saccharomyces cerevisiae
caaataaattgtaacacactatacattacaaccaaaaatgccaaaaaaggtttggaaatcatctacgccttccacttatgaacatatctccagcttaagaccaaaatttgtgtctcgtgtggacaatgttctgcaccaaaggaagtccttgacgttcagcaacgttgttgttccagataaaaaaaataacactctaacctcaagtgttatatactctcaaggtagtgatatctacgaaattgacttcgctgtaccactacaagaagccgcttcagaaccggtgaaagactatggtgacgcctttgaaggtattgaaaacacctcgttgagcccaaaattcgtgtaccagggtgaaactgtctccaaaatggcctacttagataagactggagaaactacattattgtcgatgtctaagaacgggtcgttggcttggttcaaagagggtataaaggtccctattcacattgtacaggaattgatgggtccagcaaccagctatgccagcatccattctttaaccagacctggtgatctacctgaaaaggatttctcattagccatctctgacttcggcatttccaatgataccgaaaccattgtgaagtctcagagtaatggtgatgaagaagacagtattttgaaaatcattgacaatgccggtaagcctggtgagattctacgtactgttcatgtgcctggtaccactgtgactcacaccgtaagatttttcgacaatcatatctttgcgtcttgttcagatgacaatattctgaggttctgggacactagaacttccgacaagcctatatgggtgttgggagaaccaaagaacggaaaattgacctcgtttgattgctctcaggtttccaacaacttgtttgttaccggtttcagtacgggtattatcaagttatgggatgccagagcggctgaagctgccaccactgatttgacttatagacaaaacggtgaagatccaattcagaatgaaatcgctaacttctatcatgccggcggtgattctgttgtcgacgtccaattttctgccacttcaagctctgaattctttactgtgggcggcactggtaatatttaccactggaacactgactattccttgtcaaagtacaatcctgacgataccattgctcctcctcaagatgccactgaagaatcacaaacaaaatctctgagattcttgcacaagggtggaagcagaagatctccaaaacagattggaagaagaaacaccgccgcttggcatccagttattgaaaacttggttggtactgtcgatgacgatagtttagtcagcatctacaagccctataccgaggaaagcgaatagtcgccatgctaaacgcgcggaacaaggccatatttatatatttaatgcttttaactattattagtttttctcacccagggctggtttctttaccctgtgtgatgaaagtgcgcgcctaaagttatgtatgagctactgttagtatatttattattcaatatttaattaaacaatacttactactgatgaa

SEQ ID NO: 2936 - DNA, 1805 bp, Saccharomyces cerevisiae
acttgcgtttcatttatggttgcgtatttctcgcagtgtacatagaccaaattaactctatccttccattgcacaatttgcccagtatggcttcactgttcagacccccagaatctgcgaaatgcaacccaaactctcctagacttaaactgcccctcttacgaaataatcaggtagatgaaaataatatatacttgacgtcgaatgggagttccaccacagcttacagtagccacaccccagaaccactgacctcttccacatcgacacttttctcccaaactcgacttcatcctagcgactcttcaatgactttaaatacaatgaagaagaggcctgcaccgccatctttaccttcgctcagcataaattcacagtctaagtgcaaaacactacccgaactcgtacccatcgccgatgtgtctgatggtaaacatgatttaggattgaaacagcgtgtgatagccgaaaatgagttgtctggtaatagtgacttaaccccttcatcgatggcaagccccttttcacatacaaacacctcttctccctacctcagaaatgatctgagcaattcagtgggatctgacttttcaaatttgatatcggcatatgaacaaagttcaagtcccatcaagtcatcgtcccagcctaaatcatcttctgaatcgtacatagacttaaacagtgtacgagatgttgatcaattggatgaaaatggttggaaatatgcaaatttaaaagataggatcgagacattaggcattctaggagaaggagccggtggctctgtttccaagtgtaaattgaaaaatggatcaaaaatattcgctttaaaagtgataaacacattaaatacagatcccgagtatcagaagcaaatattcagagaattacagtttaataggagtttccaatccgaatatatcgtacgatattatggaatgtttacggatgacgaaaactcttcaatttatattgctatggagtacatgggtgggcgatcgttggatgctatttataaaaatttgttagagcgtggtggtaggatcagtgaaaaagtcctggggaagattgcagaagcggtactaagaggactatcatatttgcatgaaaaaaaagttattcatagagatattaagccccagaatattttactgaatgaaaatggtcaggtgaaactttgtgattttggggtcagtggagaagccgttaactcgctagccacaacattcacggggacgtcattctatatggctccagaaaggattcaaggtcaaccatacagtgtcacatctgatgtatggtcacttggattaacgattttggaagtggcgaacgggaaatttccatgctcttccgagaagatggcagccaatatagctccctttgaattgttaatgtggattttaacatttactcctgaattaaaggatgaacccgaatctaatatcatatggagtccatcattcaaatcctttatcgactactgtctgaaaaaagatagtcgtgaacggccatctccaagacaaatgatcaatcatccttggataaagggtcaaatgaaaaaaaatgtcaatatggaaaaattcgtgaggaagtgctggaaagattaatcaataagcaattttttgcgaacatgattaagtttattttactttatttcgcattttccataaaaaaattttcctccatacaagattcatacccaggatagcctaactaaaatgtatggctttatacagcttgacgacaaacttaatttgaatatatagatatattaatttaatcagcaggattagcattta

SEQ ID NO: 2937 - DNA, 943 bp, Saccharomyces cerevisiae
attaccgtaagcatttgaaaacaataataagtttccaagtgccgctttagatccaaagtacaaggacatattgtggaagagtaagttgaatatttgaaaatgagagctttttcagcagccaccgttagggccacaactaggaagtcgttcatcccaatggcaccaagaactccttttgtgactccatcatttacaaagaatgtaggctcaatgagaagaatgagattttattctgatgaagccaaaagtgaagaatccaaagaaaacaatgaagatttgactgaagagcaatcagaaatcaagaaattagagagccagttaagcgcgaagactaaagaagcttctgaactcaaggacagattattaagatctgtggcagatttcagaaatttacaacaagtcacaaagaaggatattcagaaagctaaggactttgctttacagaagtttgcaaaggatttattggaatctgtagataactttggtcatgctttgaatgcttttaaagaggaagacttacaaaagtccaaggaaattagtgatttgtatacaggggttagaatgacaagagatgtttttgaaaacaccctaagaaagcacggtattgaaaaattagacccattgggagaaccatttgatccaaataaacacgaagcaacgttcgagttgccacaacctgataaggaaccgggtactgttttccatgtacaacaattaggtttcaccttgaatgacagagttatcagaccagcaaaagtcggaattgttaagggcgaagagaactaaccttgatgaagaattattactacctacgactttatctatatgtgccttttttctttctctgcctggtttagttttatttactacgtttacttgtatatatttgtaaactaatgaaaatataaagaaataaatctcaaaacatgcttttatactgtaa

SEQ ID NO: 2938 - DNA, 700 bp, Saccharomyces cerevisiae
gaactacgagcatggctggaggaaagattcctattgtaggaattgtggcatgtttacagccggagatggggataggatttcgtggaggtctaccatggaggttgcccagtgaaatgaagtatttcagacaggtcacttcattgacgaaagatccaaacaaaaaaaatgctttgataatgggaaggaagacatgggaatccataccgcccaagtttcgcccactgcccaatagaatgaatgtcattatatcgagaagcttcaaggacgattttgtccacgataaagagagatcaatagtccaaagtaattcattggcaaacgcaataatgaacctagaaagcaattttaaggagcatctggaaagaatctacgtgattgggggtggcgaagtttatagtcaaatcttctccattacagatcattggctcatcacgaaaataaatccattagataaaaacgcaactcctgcaatggacactttccttgatgcgaagaaattggaagaagtatttagcgagcaagatccggcccagctgaaagaatttcttccccctaaagtagagttgcccgaaacagactgtgatcaacgctactcgctggaagaaaaaggttattgcttcgaattcactctatacaatcgtaaatgaaacctctccgcccgtatattttttttaatatgttaaatagtgatagaactgat

SEQ ID NO: 2939 - DNA, 2140 bp, Saccharomyces cerevisiae
acttccaatacaattgtataccaaataagctattacaaattgatttaaaatgggtgtcgcagatttgatcaagaaattcgaaagcatctcaaaggaagaaggcgatgctaccgttgatacaaacagttcatcaaagcctctcaaatcaaacgatgaaaccaaagaattgcatcaacaagagtctactgctgttccgcaagaggttgacgtaaatgaagagtttgagaatgaaccagaaacaattaacagtagtagaactgctgagaaaccattggaaacaaacctcccaaaacctgaaactaacgaagaagacgaagaagagggctccatgagcgagaataaaatatattctaaaggtgaaaatgctgacatcaacgttaatgattttcaagaatataaagaaatggaaaatactggcgctgaagttcttgcaagtagtgttgaagaatccgatgctattcaagaaggtgtggctgaggaaactgaagggattgctactcctaaacaaaaagaaaacgaaaaaaatgatgaatcagaagaagaatctgcaaataatgcatctgaaccagccgaagaatattctcaatctgaagaagatgctgacatcgagcaatctaatggcaaagaaactgaaaatgccgaaaacgcttctcaacaagctaatgatggctctacaagtaccacgacttctaagaataagaagaaaaaaaacaaaaaaaaaaacaagaagaagagaaatggaaatgttaacaccaacgctaatgtcgacgacagcaccaaaaccggtgaaaatgatgatacaaccggcgacaccacgtcatcaacaacctccgccattcaagaagtgaatgatttggaagttgttgatgactcttgtcttggcattgatcaacagcataatagggagcatttgaaagcgttaactcaggacgttaaagaagagacgttagagaatattgcgcacgagggcagaggtgataacacaggcgatcagaatgcagtagaaaaatctgatttcgaaaaatcagatacagaaggttcaagaataggccgcgacttaccctttgaatttggaaaacgtaacttgaccgaggaatctgacgtttgggatcataacgcttgggataatgttgagtggggtgaagaacaagtccagcaggcggaggaaaaaatcaaagagcagtttaagcatcctgtacctgagtttgacaaaaaactatacaatgaaaatccggcacgttattgggacattttttataaaaacaacaaggaaaactttttcaaggacagaaagtggttacaaattgaatttccaatcttatacgcatctaccagaaaagacgcagaacccgttacaatatttgaaattggctgtggggcaggtaacacttttttcccgatcttgaaagataatgagaacgaaaacttgaggataatagccgcagattttgctccaagagccgtcgaattagttaaaaattctgaacagttcaaccccaagtacggccacgcaacagtatgggatttggccaatcctgacggtaatttacctgatggcgtcgaacctcattctgtggatattgcagtaatgatcttcgtttttagtgctttagcaccaaaccaatgggatcaagccatggataaccttcacaaaattttgaaaccaggcggtaagatcatatttcgtgattacggtgcatatgatttaactcaagttagattcaaaaagaacagaatcctagaagagaacttctacgttagaggtgatggtacaagagtttattttttctctgaagaaaaactaagagaaattttcacgaaaaagtacttcttggaaaataaaattggaactgatagaaggttgttggttaacagaaaaaggcaactaaaaatgtaccgctgctgggtacaagctgtgtttgacgttcctcaataggaagttctgagacaagtaccacctcctctctcatcataaaacaagtaaaagttttctcgtcgcgcatattattttggtgattgattgttttttcctccgatatcatcacttattacctgtaattttatctttttctaccccatagaattcgtcttataagtctataccctcaaaactatctatcattttaatattatctgtcgc

SEQ ID NO: 2940 - DNA, 1714 bp, Saccharomyces cerevisiae
gctttattatgcataaaggaaaaaaaaattaccctaatttgattacttcgtttcggatgaatttgaaaaaaatcatattgaaccatgaccgatttagccatccagaaagatggaaaacaaacgcactcttaaggttcaccttcgtgtatataaaatttctcttcgacttgatgataatcaaaaatccattaaggatggttggaaaaacttatcgagacgctgttactgcgctaaactctttgcagtccaattatgccaacatcatggctatccgtcaaactggtgatcgtaaaaacactatgacattattggaaatgcatgaatggtctcgaagaattggttactctgcatcggatttcaataaattaaatattgttcatatcactggaacaaaaggtaaaggttctactgccgcatttacttcatcaattctaggacaatataaagaacaattaccacgtatcgggctatatacgtctccacatcttaagtcagtgagagaaagaataagaataaatggggagccaatttctgaagaaaaatttgcgaagtacttctttgaggtttgggaccgtctagatagtacaacctcttctttggataaattcccgcacatgatcccgggaagtaagcctggctatttcaagttcctcacattgctttcatttcacacttttatacaagaggactgcaaaagctgtgtctacgaagtcggcgtcggaggtgaattggatagcactaatataattgaaaagccaattgtctgcggtgttacactattaggaatagaccatactttcatgcttggtgatactattgaagaaattgcttggaataagggaggaattttcaaatctggagcaccagcattcaccgttgagaaacaacctcctcagggattaacaatattgaaagaaagagctgaggagcgcaaaacaacgctaacagaagtacccccatttaaacagttggaaaatgtcaagcttggaattgctggcgagtttcaaaaaagtaacgcctcccttgccgttatgctggcttctgagatcttgcatacgtccaatatattggaggagaagatcaaatgcagttcgaatgcatcgattccagaaaaattcataatcggtctacaaaatactaagtgggaaggcagatgtcaagtactagaaaagggaaaaaacgtttggtacattgatggtgctcacaccaaagatagtatggtagctgcatcaacatggttcagagatatggttcgattgtcgaagagaaagaagatcttgctcttcaaccaacaaagcagagatgccaacgctcttgtgaataacctgtactcatctgtttcgccagaaataacgttcgatgatgtgatatttactactaatgtcacttggaaatcaggctcatacagcgctgacctcgtttccatgaacacttctcaagaagatgtagaaaaattgaaagtccaggagtcattagtcaagaattggaacaaaatagacgataatcgtgctaaaacgcatgtaacggctagtatagaggaagcaaatgaattgattgaaacgctatacgatgaacctgctgatatatttgtaactggttcattacatcttgttggcggattattggtcgtttttgatagaatagatgtaaagtaatttgaaagtaacttgcactttaaaaatcgtacataatggacttcatttgcatttattta

SEQ ID NO: 2941 - DNA, 633 bp, Saccharomyces cerevisiae
atgcttcaatccgttgtctttttcgctcttttaaccttcgcaagttctgtgtcagcgatttattcaaacaatactgtttctacaactaccactttagcgcccagctactccttggtgccccaagagactaccatatcgtacgccgacgacaccactaccttttttgtcacctcaacggtctactccacgagctggttcacctcaacttcagccaccattaccaatgcggcctcctcctccttgtccacctcttcggcctctggatctgtaaccccagaatccacccatgaaattacctccacctcgactatcacgtccactttgctgctaacccttcatgactccactactttgtctccatcatctactgcagcaagtgtcagtgacgaagattcaaacaacaaagatgcaaaggtcaagtcctttgaacaggcttcaacttccaatggttgcgtcccaatcacaaagtttgtcactgtcaccaatgagcccgttacccagtacgttacagtcaccccaaatacgactacacaatacgttactgtcaccggtgcaccttctgttaccactacctctccaggtaacgtacaatggtacaacaccacttcgattactaattcgaccagttggtga

SEQ ID NO: 2942 - DNA, 664 bp, Saccharomyces cerevisiae
gaagggagtagtgcgaaatatgggccgtgatatatgcacattagacaatgtttacgctaacaatttgggcatgctaaccaaactagctcatgtgacagtaccaaacttatatcaagatgccttcttcagtgcattattcgctgaggatagcttagttgcaaaaaataaaaagccatcttcgaagaaggatgtacatttcacacagatggcttattacagtgaaataccagtgggtggtttggttgctaaattagttcctaaaaaacaaaacgaactatctctcaagggcattcaaatcgaatttttgggcgtgttgcctaattataggcacaaatccatcggttcaaaattactgaagtttgcagaagacaaatgctcagaatgtcatcaacataacgtgtttgtctatttaccagcagtggatgatcttacaaagcaatggtttatagctcatggcttcgaacaagtgggcgaaactgtcaacaatttcataaaaggtgtaaatggcgacgaacaagatgctatcttattgaaaaaacacatttcttaacagatggctgaaaaattttttttttttttttggttttgctttgtatacacatgtatctatttttataaagatgaaatatatacgtctaagagctaaaatgaaaaactatactaa

SEQ ID NO: 2943 - DNA, 1990 bp, Saccharomyces cerevisiae
tgctgaccaaaagttcccaccgttgatagctcccccccctattgtcgtagtcatgtcaattcaggcttttgtcttttgcggtaaaggttccaatttggctcccttcacccagccagattttccattccaaacgcagaacaaagacagtacagctgccacgagcggtgacaaacttaatgagttggtcaatagcgccctcgattcaactgtcataaatgagttcatgcaacattcaacgcgcttgcccaaggctcttttgcccatcggtaatagacctatgattgaatacgtcttggattggtgtgatcaggcagatttcaaagaaatcagtgtggtcgcacccgttgacgaaatcgaattaattgaaagtggactgacttcgtttttgtccctaagaaagcaacaatttgaactaatatacaaggctttgtcaaattccaaccacagtcatcacttgcaagatcctaagaaaattaatttcatcccttcgaaggcaaattctacaggtgagtccttgcaaaaagagcttttgcctagaatcaatggcgattttgtaatcttgccctgtgattttgtcacagatatacctccacaagtcttggtcgatcaatttaggaatagggatgataataacctagcaatgactatctactataagaactctttagatagtagtatcgataaaaagcaacagcaaaagcaaaaacaacagcaatttttcactgtttattcagaaaacgaagactcagagaggcagccaatacttttggacgtttattctcaaagggacgtcacaaagacaaaatatctacagatcagatctcatttattatggaactatccaaatttaacagtatccactaagttactgaactcattcatctacttttgttcctttgaactttgccagttgttaaaattaggacctcaatcaatgtcaagacaagcttcattcaaagatccatttactggaaaccaacaacagcaaaaccctcctactactgatgatgatgaagatcgcaatcatgatgatgacgatgattacaaaccttcggctacatctatccagcctacctacttcaaaaaaaagaatgatctcatcttggacccaataaactgtaataaatcattgagtaaggtttttagagatttatctcgtcgttcgtggcaacattcgaaaccgagggaaccaataggtatttttattttaccaaacgaaaccttgttcatcagagccaataacttgaatgcttacatggacgctaatagatttgtactaaagataaaatcacaaacgatgttcacgaaaaatatacagattcaatctgccgctatcggtgctgatgccatagtagatcccaaatgccaaatctctgctcatagtaatgtcaagatgtctgttctcggtactcaggccaatattggttccagatgtcgtgttgcagggtctctcttatttcctggagtccatcttggtgacgaagtaatcctggaaaattgtattattggacctatggcaaaaatcggttcaaagtgtaaactcagcaattgttatatcgaaggccattatgttgtggagcctaaaaataactttaaaggtgaaacactggccaacgtttatttggatgaagatgaggaggacgagttaatatatgatgatagtgttattgctggagaaagtgaaatcgccgaagaaactgacagtgatgatagaagcgatgaagattctgatgatagtgaatataccgacgagtacgagtacgaagatgacggattatttgagcgttaatataaacttatgtatattccttcagtctctttaatagagaccaagtaagtaagtggacgagaatagaggcgatattatgcatttatatttgaaattcaacagaacataattatgcttaagcaaattaacatgttgtattaatacatagcgttttacacatctatttcatatattatgttatgttaatttttgaattaattt

SEQ ID NO: 2944 - DNA, 1418 bp, Saccharomyces cerevisiae
tgaaccatttataattgtgagggcaggatagcaaaaaaatcctacagaataacttagtaatgccaagaaagtttttgggcaataaaattgaaaagaatgttgatgcagtcagaccatcttcgctaacattaacagctgatgacttgaagtatattccaccgataccacaagattttgaagatgaagatgataaggttttacgtaccagcaacggtggtaacaggttgtctaaaagatttgggggtacactgaaactgaagaaacggttagagtctgttccagaattgttcttacatgatttcaagaagaggccacgctcccaacttgaggtgattagagagaaaaaatttactgacatgcaagttcccaagggaccagtttgtcctcaaagcacgattctaccattacgagaaagaaagaaggtaaaatcactaccaattcaaagaaaaagtttacgtaggccgacgctgtcaaagcctgcagtagtacaatctttagggcataagacacattcggatcatattattgataaagtgtttgtctctcgcccggccccaattgtaatgcctgtaaaagcccttactcctattaatccggtctccctaatgcaaacacagacacaagattgctgtagaaaaaataagtatggcaaaagcggtagtgaaatattgtttgacgaaattctatcagcctatgaaaacgtttctacaagcgattctactgccctaaattcagaaattgacagaattatcgatatatgcgcttcaaaacaaatagctaaaaaaaatgaggcatttcaggtaccatatgtcgtctgccctgacgacacagagactttgttttcgtcaacaacaccaaagttgaaacctgtcaattctaacacattaaacgatgtcatttctagcccagaatacaccacgtctggatgcagtacatactctgaccaatcgaattcagatgaggaattgtccgaagtagaaagtatagtatggaacacgaataagaggacaatgagatcatccattgtgtctgaaagcactagtgaggaaggctattgcactgctgcggagactttgccctcaacagtatcagtggaagatctggatatacataacaagcttccaaaagttgcacaaacatcatcgtgcaatacgcttttgaataaactctctataagaaaattaaaaaaagtaattctcgatccgcctaaaataatgcatgtcatgacttttgacgatgacagtgatgatggagatgacaacgatgacgaggatagggctttgaatattcttcaaaaaaaaattgactgcattgaaatagcaagttgcagcagtagcatttacagcgaataaaaaaatttattctaggtttcaagtaaaatcatacgtatataagtagaataatggcatgagcggtga

SEQ ID NO: 2945 - DNA, 388 bp, Saccharomyces cerevisiae
ttgaactcaagaaaactacatttcactatcaatggcacccacacaattggatataaaagtcaaggccttgaagaggctgactaaggaggaagggtactaccaacaagaactgaaagatcaggaagcacatgtggcaaaacttaaagaagacaagtcagttgacccatatgacttgaagaaacaggaggaggtccttgatgacacaaaaagattattacctactttatatgagaagattagagaatttaaagaggatttagaacaatttctaaaaacttaccagggtaccgaagatgtcagtgatgcaagatccgctattacgtctgcacaggaattactcgattctaaataatctatagataacctttttcttaccttttcgcattta

SEQ ID NO: 2946 - DNA, 1501 bp, Saccharomyces cerevisiae
tacctaaagttttaaagacaataccaagggaaactgcacaaattcaatatgacagaagataaatcgcaggttaaaatcaggtttttcacgcgtgagaaagatgaattactacatgtacaagatactccaatgtacgcccccatctcattaaagagatatgggttgtccgaaattgtcaatcacttgttgggctcggaaaagcctgttcctttcgatttcttgattgaaggtgaattgttacgtacttcattgcacgactatttgaccaagaaaggtttatcgagcgaagcctcgctgaatgtagaatataccagggcaattcttccaccatcctatttgaatagtttcagcaatgaggactgggttagctcattggatgtcggcgacggttccaagcatattattagtggttcttacgatggtatagttcgcacctgggatttatcaggtaatgtgcaaaagcagtacagtggtcattctggcccaatccgtgcagtaaaatacatttccaatacaaggctagtttcggctggtaacgaccgtactttgagattatggaaaaccaaaaacgatgatttgaaattaacttcacaacaacaggcacaggaagacgatgatgacgaagtaaacatagaggacggtaagacactggctatcttggaaggtcataaggcaccagtagtctctattgatgtttcagacaactcaagaatattatctgcatcatacgacaattctattgggttctggtctactatttataaggaaatgacagttgttgatccattagaagatataaacaatccaaacaataaaatatccactgctgctagaaaaaggagaaaattgacaatgaaagatggtaccattagaagacgtgcccctctgtctctgttagaatcccatacagctcctgttgagcaagtgatcttcgattctacagataataccgttggttattcagtatcacaagatcataccatcaagacatgggatttggtcaccgcgagatgtatagatacaagaacaacatcgtactcgttgctttccattgctcaattgtcgactttgaacttgttagcatgtgggtccagcgccagacacatcacattgcatgacccacgtgtgggagcgtcttccaaagttactcagcaacaactaattggtcataagaacttcgtttcctctctggacacttgtcccgagaatgagtatatattatgctcgggttctcacgatggtaccgtgaaggtatgggacgtcaggtctacttctccgatgtacaccataacaagagaagacaaatcggtccaaaagggcgtcaatgacaaagtttttgctgtcaaatgggctgaaaaagtgggtattatcagcgctggtcaagacaaaaagattcaaataaataaaggagacaacattttcaaaaactgagaaaaaactgttgttgtttttatgtagaataatgtactgatatacttgaaataaatttggttttgccaac

SEQ ID NO: 2947 - DNA, 620 bp, Saccharomyces cerevisiae
acctgaatataggattaagaacttttatttaatttcacgacatgatcaagtatactatcgatgagctttttcaactgaagccaagtttaactttggaagttaatttcgatgcggtggaatttagagccatcattgaaaaagttaagcaattgcaacacttgaaagaggaagagtttaacagtcatcatgttggtcatttcggtcgtagaagatcttcccaccatcatggtagaccaaagattaagcacaacaagcctaaggttacaaccgattcagatggttggtgcacatttgaagccaagaagaagggtagtggagaagatgatgaagaagaaacagaaaccacaccaacttctactgtgccagttgctaccattgcccaagaaactttaaaagtcaagccaaataacaaaaatatttcttccaacagacctgctgataccagagatattgttgcggacaagccaattcttggtttcaacgcatttgctgctttggaaagtgaagacgaagacgacgaagcataagtcattcgctcatgctttcttcaggcagctgtacgtgtactatgtataaattttgaataacattttttttaataaacagtttttactctttta

SEQ ID NO: 2948 - DNA, 828 bp, Saccharomyces cerevisiae
atgtctagtcgtaaaaaagtcagagtattactgctcaagaataaaactgtccccattgataaatatgaattggagtgtaggagtaaggcgtttgaacccatattcgtaccgcttattaaacatacacatgtaattcaagattttagaaatgttttgaataccatcccaaactatttgaatactatcaattacattattattacctctcaaaggactgtagagtcattgaatgaagcgatcattcccacattgacaagtgaacaaaaagctgcattgctcagtaaaacagtttatactgtaggccctgctactgctaacttcatcagaagatcaggtttcattaatgttaaaggtggagaagacgctggtaatggttcaatccttgctgatataattattgatgacttgagtacggatattaaggcatgcccaccaagtgaactattatttctcgtgggtgaaattagaagagatatcatcccaaagaaactccatagcaagggaataaaagtaagagaagtggttacttataaaactgaagaattaagcgacggttttaaaagattcatacacgccatgaaagaatgcgatgaggatgaagtattctcggactgggtggtagttttcagtccccagggaacgaaagaaattactcagtatttgggtgacagtaaccgcctaccaggttcccatctacgggttgcgtccatcggacctaccactaaaaaatatctggatgataatgatgtaacctctgatgtggtcagtccaaaaccggaccccaagtcgctattagatgctattgaattataccagcgccataaataa

SEQ ID NO: 2949 - DNA, 921 bp, Saccharomyces cerevisiae
cgaattagtctcatactgtaagatcaaagcggcaacgaagctcgaagctatacaagcacccaaaaatatatttatacccaagaatgactaaggaagtaccatattattgcgataatgacgataacaacatcatcagattattcattattaggcatggacaaacagaacacaatgtaaaaaaaattttgcaaggtcacaaagatacctcgatcaatcctacgggagaagaacaagccactaaattggggcattacttgcgttcaagaggtattcattttgataaggttgtcagtagtgatttaaaaaggtgtaggcaaactacggctttagttttgaaacattcaaaacaagaaaatgtgcctacttcctatacttcggggttaagggagcgttatatgggtgttattgaaggtatgcagattactgaggctgaaaagtatgctgataaacatggtgaaggctcctttagaaattttggggaaaaaagtgacgattttgttgctaggttaactggatgtgtcgaagaagaagttgctgaagcatctaatgaaggtgtcaagaatctagccctagttagtcatggaggtgctatcagaatgattttacaatggttaaagtatgaaaatcatcaagctcataagatcattgttttcaacacctctgtcactatagttgattacgtcaaggactccaagcagtttattgtgagacgtgtcggaaacacccaacatcttggtgatggcgaatttgtcgtcagtgacttaagattacgttagacactatatggttattcactgttgggtttttctcattttgtattagaaatgcggtttaggtagtaatagaaatttcgcatgcgtgtattttattttaaaacatatagttcgtaagggtttatctaaatgcagtagatgttcataa

SEQ ID NO: 2950 - DNA, 502 bp, Saccharomyces cerevisiae
aaacgatattaaaatgtggaaggccgtgatgaatgcttggaatggaaccgagagtcaaagtaagaatgtttcaaatattcaatcttacagttttgaagacatgaaaagaatcgttggaaagcatgatcctaatgtggttttggtagatgttagagaaccatctgagtactcgattgttcatattcctgcttccatcaatgtgccatatagatcgcaccctgacgcatttgccttagatcctttagaatttgagaaacagattggcatcccaaaacctgacagtgccaaggagctaatattttattgtgcttctggcaaacgcgggggagaagctcaaaaagtcgcctcctcacatggatattcaaacacctcactatatcctggctctatgaatgattgggtttctcatgggggtgataaacttgacttatagccttgtatactctaggtatgtaccctgtgtattttcgtaagctagtaacgtattatgccatttatgtca

SEQ ID NO: 2951 - DNA, 527 bp, Saccharomyces cerevisiae
agaagaaaaagaccaacgatgttcaagcatagtacaggtattctctcgaggacagtttctgcaagatcgcctacattggtcctgagaacatttacaacgaaggctccaaagatctatacttttgaccaggtcaggaacctagtcgaacaccccaatgataaaaaactattggtagatgtaagggaacccaaggaagtaaaggattacaagatgccaactacaataaatattccggtgaatagtgcccctggcgctcttggattgcccgaaaaggagtttcacaaagttttccaatttgctaaaccacctcacgataaagaattgatttttctttgtgcgaaaggagtaagagccaaaactgccgaagagttggctcgatcttatgggtacgaaaacactggtatctatcctggttctattactgagtggttagctaaaggtggtgctgacgttaagcccaaaaaataagccaaaaagaaacaagtataatcgatatatcctgtatatagacaaccttttgtgtattt

SEQ ID NO: 2952 - DNA, 4532 bp, Saccharomyces cerevisiae
taaaaaggagcccagacttactgatagatcttgcatatactccggtaatggatattccctcttcaaaccaaattcaacatggccaaaggagtgaaaggaaccgaagaatgccgagggcttctttttcttctacagccactacttctacggcggccacattgacttccgcgatggtactggatcagaacaattcggaaccgtacgcaggtgcaacattcgaagccgtgccaagttctattgtatcattccatcaccctcattcttttcaatcaagcaacctcccaagtccgcattcttcagggaacctagagcagagaggccgccgattgactgaatcagagcctttagtattatcctcggctgaacagtctcgaagctcttctagaaacccttctcattttcgatttttcactcaggagcaaatatccaatgctgaaggcgcttccacgttagaaaatacagattatgacatggcctgggatgccacccccgcttatgaacaagatagaatctatggtacgggcctatcttccaggcgttcttctattcgaagtttttccagagcatcatctctctcaaatgcaaagtcttatggatctttcagtaagaggggtcgctctggttcaagggcaccacaaaggctgggagaaaattctgacactgggttcgtttatcattccgctacacattcatcatccagtttatcgagatatacgaccagagaaagaattcctattgaactagaaagtcaaacagatgaaatactagaagacgagtcttctacacattctttagaatcttcagatagtaggcgatctgcaagcgaaaataatagaggaagcttttctggtcatgatgatgttcataatcagcatagcgaatatctaaaacctgactatcatgaaaagttttatccacagtatgcaccaaacttgcattaccaaaggttttacattgcggaagaggatttagttattggtatcgctgcttaccagacctcaaaattctggtatattatttacaacctgtgctgcttcttgactttcggattagtttatcttttaacgagatggcttccccatctcaaagttaaattatatggcgtgaaagtgccattggctaaagcagaatgggtcgtgatagaaaatgagtttggtgagtttgtcatacaacctatcgatcgacagtggtataatagaccattaagtactgttttaccttttgaaaattaccctaatccgtcatatgaaccaaatgatatcaatttgagccaccaccatgccaatgaaattaatccaaatgtgcctatcttgatcacatttgaatacagatatattaagttcatatattcaccgctcgatgatctctttaaaactaacaataactggatagatcctgactgggtggatttaagtaccgtatcaaatggtttaactaagggggttcaagaagatagagaacttgcgtttggtaaaaatcaaattaatttgagaatgaaaactacttcagaaattttattcaatgaagtgttgcatccgttttatgtctttcaagtattttcgataattttgtggggcattgatgaatactactactacgccgcatgcatttttttgatttctgtactgtctatttttgattcattgaatgaacagaagaaagtatcgagaaacttagctgaaatgtcgcactttcattgtgacgttcgtgttttgagggataagttttggacaacgataagctcatcagaactagttccgggcgatatatatgaagtatctgacccaaatataacaatattgccttgtgactctattcttctgtccagtgattgtatagtcaatgaatccatgctaactggtgaatctgtgcccgtttcgaaatttccagctacggaagaaacaatgtaccaattatgtgacgacttccagagcacccaaatatcgagttttgtttccaaatccttcttgtataatggtacaaatataattagagcaagaattgcccccgggcaaaccgccgctttggcgatggttgtaaggacaggattctcaacaacaaagggctccttggttcgttccatggttttcccaaaaccaactggttttaaattctatagagattcctttaaatatattggattcatgtcattaatcgcaattttcggtttttgcgtcagttgcgttcagttcattaaacttggtttagacaaaaagacaatgatattaagagctttagatatcataacaattgtagtgccaccagctctgcccgcgactttaaccattggtaccaattttgctttgagtaggttaaaggagaagggaatattttgtatctctccaacaaggcttaacattagtggtaaaatcgatgttatgtgttttgataaaactggaacacttaccgaagatggcttagatgtacttggagtacaaatatcggagccaaatggggttagaggccagaagtttggagaactattgagtgatattcgccaagtatttcctaaattttctttgaacgattgtagttcgccattagattttaagtccaggaactttttcatgtcattattaacatgtcactcgctgagatcagttgatggaaatttactcggtgacccactagactttaaaatgtttcaatttaccggttggtcattcgaggaggacttccaaaaacgagcattccattcattatacgagggaagacatgaagatgatgttttcccagaaaattcagaaatcattcctgcggtagttcaccctgatagtaataatagagaaaatacgtttactgataatgatcctcataattttctaggggtggtgagaagctttgaatttttatctgagctgagacgtatgagcgtaattgttaaaacgaataatgacgacgtatattggtcgtttactaaaggtgcgcccgaagttatttcagaaatatgtaataaatcaactttacctgcagattttgaagaagtactacgttgttacactcataacggatatagggttattgcatgtgctgggaagacacttccaaaaagaacttggttatattcccaaaaagtatctagggaagaggttgagtcaaatttggaatttttaggtttcattatcttccaaaataaactaaaaaaagagacctctgaaactctgaaaagtttacaagatgcaaacatcaggacgataatgtgtacgggtgataacatacttactgctatttccgtaggtagggaagctggtttgatacaatgctctcgcgtttatgttccatccattaatgatacacccttgcacggtgagcccgtaatagtatggagggacgtcaatgagccagataaaattttggataccaagactttgaaacctgtcaagctggggaataatagtgttgaaagtctacgtgagtgtaactatactcttgcagttagcggcgatgtatttagactgttgttcagagatgaaaacgagataccagaggaatacttaaacgagattttattgaattcatcaatctacgcaagaatgtcgcctgatgaaaagcatgaattgatgatacagctgcagaagctagattatacagttgggttctgtggtgatggtgcaaatgattgtggggcactcaaagcggcagacgtaggtatttccctttcggaggctgaagcttcagttgctgctccgttcacttcaaagatatttaatattagctgcgtacttgatgtcattagggaagggcgtgctgcgttagttacatcttttgcatgtttccagtacatgagtttgtactctgccatccaattcatcactattactatactttacagccgtggttctaatttgggagatttccaattcctgtacattgatttattgctgatcgttccgatcgcaatttgcatgtcatggtccaaatcctatgaaaagatagataaaaagaggccttccgctaacctagtttcacctaagattttggttcctcttttgattagcgtattcttggtgtttttattccagttcattccatggataatcgtacaaaagatgagctggtacatcaagccaatcgttgggggcgacgacgccgtgcaatcttcagataataccgtattgttcttcgtctcaaattttcaatatattttgactgctatagttttgtctgtgggtccaccatatagagagccgatgtcaaaaaactttgaatttatcgttgatatcactgtctctatcggtgcaagtctactgctaatgactttggatacagaatcataccttggtaagatgttacagctgacccctatatcaaacagttttacaatgtttatcattgtatgggtgatattaaattactatgctcaactgtatataccgccatcgataaaaggttggttaaagaaaaagaagagtagcaaaaagtataaactactgatacaagaagaaatgaaattaaaagaagtttaaagcaaagatttttatctatgtatgtgtacaagtaccatgttctataattaaaattattactattta

SEQ ID NO: 2953 - DNA, 494 bp, Saccharomyces cerevisiae
tttagcaagaacagtacgaactaagtagccaagatgttgatgccaaaggaagacagaaacaagatccaccaatacttattccaagaaggtgttgttgtcgccaagaaggatttcaaccaagccaagcacgaagaaattgacaccaagaacttgtatgtcattaaggctttacaatccttgacttctaagggttacgtcaagactcaattctcatggcaatactactactacaccttgactgaagaaggtgttgaatacttgagagaatacttgaacttgccagaacacattgttccaggtacctacattcaagaaagaaacccaactcaaagaccacaaagaagatattaaggaattcgtagctccaattgaattttctcttttgtaacattcttctggttctatatatctaggtttatattttgatgtgttgtactttcaattacattgaacttatgtatattttttaattaataaagtgaaatcaaaagcaa

SEQ ID NO: 2954 - DNA, 809 bp, Saccharomyces cerevisiae
cgactaagccgtatatccagacagcatatacctatatactattctagatgtcagcagaagattacaagaacttaccagtcaccgttgaaaagcctatcccagtggtatacgatttgggtaacctggcagcattcgatagtaatgtcttggataaaaacgatttagattcttcgaatgctaggcgtgaagaaaagataaagagtcttactcgtgataatgttcagttactaatcaatcaactattatcactacctatgaaaacaacaacggagtctgtaggtggcaccggcggtcaaagttccgtgatgaccttgttgcagcttcctgaccctaccactgacttaccaagagaaaagccactgccaaaggctaaggctatgaccaaatgggagaagtttgcagctaagaagggtattaaaccaaaggaaagggcaggaaagatgatttatgatgaggcatccggtgaatgggttccaaagtggggctacaagggcgcaaataagaagttagatgatcaatggttggtggaagttgatgataaagtaaaaggcactgacaatgaattgatcgatccaagaactttgaatagggcagaaagaaaacgtttagtcaagaagaacgaaaaacaacaaaggagaaatatgaagaatgccttatgatagtgaaagacgttgttgcttcctacttgcgtccccaatcgatccgctaaccttttttttaactacagcataacctcacatctacgtatccttacatctataatatttttaaataattgtaaattagaaaaacatcaaaattccgttcta

SEQ ID NO: 2955 - DNA, 2241 bp, Saccharomyces cerevisiae
atgattacgcagaattctataccagaggtaaaagaagattttattggttatgctttacatgagagaagaattcggttaccgcagtttcaagacttagggccggcagacttggtcacactaacaaagtatttgcccacttcaagtaacacaaatgccataaacagtacgagtagaaatggtgcggccattattcagtcccctgcagccgttgtagccgatgactctgccgcttccatggcaaccaatggcgatgctagtgacaccgccgttaccacaaattatacaaatgcatctatatacagtagcagcagaaatgccaatgatggagccccgatggtcgctgagctccatccacttgataaactgaaggacgaagtagggacatttttttactcaatgggtgtcgatacatccggtccaacttcaatcgcaatttttttgaaggagatttcagaggtcatcagcgagaaaccccaagtttggtttggcaggaagaaaaccttcaatgttgctcgaatttcattttccacttggaatgcgttcaggagatgcgacataaatgtcgtcgttcatattccaggatcgattcagaactttatagtggattgcaacggtgaaagtcaaaatatagagatgtgtgcggattatgacttaatttgggctgaaacgttcgtaagtggcgtagtacggtcaatcatgttaatgaaggaaaacgctgaagagggagaattacaaaatttagtggaaaccttgattttgaacccgtttactgcaggacaaatcgacgatgtaccagaaatgttcattgatctgttccctatagtttaccataagggcccattattgggagctccgtattatattaccaatgtgacgaacactaataactatttggtagaaacactcgttgagatagttaagctgactcgtaatgttagcagggcggaaataatgttgaagaatctggctaccgacaaccctgaggcgatcataatactaatcaagatctttttggtgtgtgatcaagaattagacgcaataaagctcacatacgatatgctttcgcaggataaaataataaacaacactaataaccgcatggattataaatctgaattactgtgcttacaagcgcaatttttgatagacaaaaggcaggattacagcttggcgcaaaacatagcgcaagaggcagtcaattgttctcccagtgaatttagaccttggtatcttttatccaaggtgtatgtaaagctaaatgatattgaaaatgccttactgatactgaattcatgccctatgtctccattaaaggaaaaatacgtactgaaaagagtagctccgttgccttcgaataatagtcttcatttgccattgccaattgacgttgtactggatgaagtgacgtcgttgaatccacaagacgttcagaatgaacaccgctctgcggatccaatgctggtcaatttagctgcgtcgaacttgaaatctactttccaattggcataccgattattgacagaaattgtgcagatcaccggctgggaaaatctgttaaagtacagatcaaacattttcgttatggaagaagagtaccaaaaatcatcatcttcgttaccaaaggacgttaacaaacaagaagaacagcctctgagggctaaacggctgtgtgaacgatggttagacaacctcttcatgcttttatatgaagacctgaagatgtatacattatggcaaaccgaacaactgtacatggatgcacagaataacaaccacaataagttgactttcgaatgggagttatttggcctttgtgcacgtcgactgggccatttccctgaggccgccaaggccttccagaacggtttatcgcagagattttcatcaaggtgcgcgaggaaactgctggaatattgtataaacgaacgccaacgggtcaaaaattttataaactcacctaattcgcatgacatggtccctgaaatagtaagctcacgcataagagagctagacaatagcattatcgacctttgcgtgaagatatgctgctggaaccaccgttggtatacggaattttccataagtttacttgattgtttaagtgtggttattcaagatatgagtctgaccaaagtttcgaatgaaatctcgtcaagatatccagaaactgttctcaacttggtgcaggagaatttgctcaatttcttcactacttgcaccattggatgctacgatgcataa

SEQ ID NO: 2956 - DNA, 1599 bp, Saccharomyces cerevisiae
attcatcatgaaggaagagctcagcaaagtgagcagtatgcaaaatttcgagatgatccagcgtgaacgattgccaacattgtatgaagtgttaatacagaggacatcgcagccagttgatctctggactttttatacatttctttcacaattcccatatgccatcaactatctggacttttgggttgaccttatgacacatacacgactttgcaaaaactacatagagttggtaagaaaatcattaatcaactttccacaagaacaacagcagaatggaagtacatctacggctacatttgacttgctgaacgcactgatagaagaagggcacctagacccggaagcacctgataaactcttagaaaatagcggcccagacgtgcccttttcaccaaaattaaacgaattgctgggtgattggaagcaccaatcgggtatcggtcaagaagccctgagaaacgaagacgtagcgctgatcgtcgacgagataatgaaaaggcgctcccaacaagacggaaaaccgcagataactacaaaacaactgctgcacagcgcagttggtctctgcaacacctatttagtatcgcccgaacaaagcgaacggtacctgagcaacatccccatggaaacgcggaaccgcataatagaaagcgtacaaatcgagcgaaagtacgacattgagatttttgacgacctaaaaaacctaacttaccaattcctagaaatggattgtttcccaaaatttctaagccgcgtcgcactacacaacatccacgatgaaatatctgattggagattccactcagtgggcgtcaccaacgaaaaaagcaatcgctctcgaggccagacgcacatttctcgctcgccattctccaatcacacgtcaatcagtcgtattggctttggtttgctctggctaggcatcggcttttggatcggatatgttctaatcttcctggcgtatagtcgcgcaatccgtgtcgttacggtcgtgccatttacactgggatgctactgcattgtgtgtggcatgtatcaagtggacattgtgtattcctggtttggcgtcacacagagacttctccacagacacaaaaacgctggcaatgacgaaggagatgcttctagtgataccgatcacgtgccaatgatacttgcggtgttcggcggtaggcgccgtcttacccgcatagagcacccatttactcggcagcttctacgtaagcgtggactgtggtgtctgcttctcgtagtgggtgccactgccgcattcacagttattttcagctgtgttcccggccgtcgtgtatgatgtaatccatcacccccctataaaaacacctgtgcaccgcatatttccatagcgcgtgacgctaagtacaagaaacagcgaggggccgttaagtgcaggctttaccgagggcgccggctggcgcttcccgtggaagggtgtttgactcatcatcgcatcgcattacctcatgatgagtaaatagttgcgatttcacttatcacctctcgcggaaaaaaaaggcgatgacatgatatataaggctctctcgtaagacacttaactatccaacgttcattagatta

SEQ ID NO: 2957 - DNA, 270 bp, Saccharomyces cerevisiae
tcgtttctttttcttttttttttttttttttttcttcagaactataacacatagatacactcgaacatctaattgtttaaatactgcaaagaatacaaggtaatcgactcttctacataccctttttgcagatttgaaataaaaaaaacattatatgtttagcttatcgaactctcaatacacctgccaagactacatatctgaccacatctggaaaactagctcccactaatttcattgcttaataatcagaaattctatcacaaacca

SEQ ID NO: 2958 - DNA, 1297 bp, Saccharomyces cerevisiae
atgtcctccgctgcaacaaaagctactttctgtatccaaaatggtccttcctttgaaggtatatcttttggtgcaaacaaatctgttgctggtgaaacagttttcactacttctctggttggttacccagagtccatgactgatccttcctaccgtggtcagatattagtcttcacgcaacccttgattggtaactacggtgtcccatccggcgaagcccgcgatgaatacaatttactgaagtattttgaatctccgcatatacatgtggtcggcatcgttgtcgctgaatatgcttatcaatattcgcattggaccgctgttgaatctctggcacaatggtgtcagagagaaggtgttgctgctattactggcgtagacacccgtgaactagtgcaatacttgagggaacaaggttcttctttgggccgtattacgttggctgatcatgaccctgtcccctacgtgaatcccatgaaaactaacttggttgctcaagtcaccacaaaaaagcctttccacgtctctgccttacctgggaaggctaaggcaaatgtggctcttattgactgtggtgttaaagaaaacattatcagatgcctagtcaaaagaggtgccaatgtaactgttttcccctatgattacagaattcaagatgttgcttctgaattcgacggtattttcttatccaatggaccaggcaacccagaactatgccaagctacaatttccaacgtcagggaattactaaataaccctgtttatgactgtatccctatttttgggatttgtctaggccatcaactcttggctctggcctccggtgcctctactcacaaattgaaatatggtaatagggctcacaacatccctgccatggatttgactaccggccagtgccacattacatctcaaaatcatggctatgcagttgatcctgagaccctaccaaaggaccaatggaaaccttattttgttaatttaaacgacaaatcaaacgaaggcatgatacaccttcaaagacccatattttctacccaatttcacccagaggcaaaaggtggtcccttagacacagctattctttttgacaaattcttcgataatatagaaaaataccaattacaatctcaggcaaaaagttcaatctcactaaaagtaacatacagtaccgataaatcgagattgcagagtataaatgttactaagttggccaaggaaagagtgttgttctaaaaacaaaatttatacattacgtaacacatacgtacatctaaatacgattcaattcagttca

SEQ ID NO: 2959 - DNA, 1341 bp, Saccharomyces cerevisiae
ggtgataagttgttctgtaaatatgtttgattagttaaacaagagaaatataaaattaagaaaaaaaaaatttcaaaaacatggatgaaatgcattcttcagacacacttttgttgcgaacaccgaaatcaaaaaaaaaaattgggcttgtaatacccagtacaccaagtaaaaaatgtaaatattcatcaggctttatagcagaagacactacgccctccaaacggtttcgtttataccaagccaaatttaagacaagttcaaagaatgtcaaagcccaaactcttagcgtatcaataaaaaaaaatcaaggtgaaatcaccaatccatttatgaccgaaggatataatgattaccggaatattgtcagtcctggattgagttttgataacgactgcttttcagaacatgaattagttagtccattgagtgatatatcttcgataaactcgacatcgcctgatgttgaaaagattgattctttagatccttttggcgttgattcttttgtctggaactgtaagccgcttgttaataaagaagcactggagctccaccgaatgattcattcttcgtttccgatgagcccactggaatccaacagtgatgtgccacttttattgcctaaactcaaaaaaaggttatctccagtaaacagatcgaccttcaagccaacaaggtacgaaccctctcaccgtctattgaagcccaaaaaatcaattctaacagtaccagccaaatctctgaatctcatagtcagttcgtcgcgaggctcattaaatgacgctaccatctttgccaccgaaataaattctactttgagcaatgaagaaaacaaattaccagcaatttctagtatttgggagaagctcacaattccagtaaactcttcaattaaggagaaatacaagaagcttaaagaccaaatatatgggcaagctagtaattttggcgaagatgaagataatgaagaagacaatgaagacgaccttcccgacgcggcagtaataagaggttacgaatttcagtcaggaaggcgcgatgagctgacgcaatgtaatgaactacagagtacgaaggactacaaaaaagttcagtgggcaaaggttttagaacaataactaggttctttttcttctaatttgttgaattctaaacaaaggagtttttttttattatttcttaacaactggtctttttaattaaatgaaaaaagataacagcattattgtgctaagtattgtactcttttttagaagctggagtaatctaaaaaaagctaaacaccattattactattttccttcctcaagttgttgttttgcaagactattgctatta

SEQ ID NO: 2960 - DNA, 2497 bp, Saccharomyces cerevisiae
ggctttaaccgcttatttttctctctttttttccttttacccctcacttgtcgtgagacaattgtagtatatttagtaagtatagaaagttcttgttgttaaaaaactcgttaggatacaataaaaactagaacaaacacaaaagacaaaaaaagacaacaatatggttgctcaatataccgttccagttgggaaagccgccaatgagcatgaaactgctccaagaagaaattatcaatgccgcgagaagccgctcgtcagaccgcctaacacaaagtgttccactgtttatgagtttgttctagagtgctttcagaagaacaaaaattcaaatgctatgggttggagggatgttaaggaaattcatgaagaatccaaatcggttatgaaaaaagttgatggcaaggagacttcagtggaaaagaaatggatgtattatgaactatcgcattatcattataattcatttgaccaattgaccgatatcatgcatgaaattggtcgtgggttggtgaaaataggattaaagcctaatgatgatgacaaattacatctttacgcagccacttctcacaagtggatgaagatgttcttaggagcgcagtctcaaggtattcctgtcgtcactgcctacgatactttgggagagaaagggctaattcattctttggtgcaaacggggtctaaggccatttttaccgataactctttattaccatccttgatcaaaccagtgcaagccgctcaagacgtaaaatacataattcatttcgattccatcagttctgaggacaggaggcaaagtggtaagatctatcaatctgctcatgatgccatcaacagaattaaagaagttagacctgatatcaagacctttagctttgacgacatcttgaagctaggtaaagaatcctgtaacgaaatcgatgttcatccacctggcaaggatgatctttgttgcatcatgtatacgtctggttctacaggtgagccaaagggtgttgtcttgaaacattcaaatgttgtcgcaggtgttggtggtgcaagtttgaatgttttgaagtttgtgggcaataccgaccgtgttatctgttttttgccactagctcatatttttgaattggttttcgaactattgtccttttattggggggcctgcattggttatgccaccgtaaaaactttaactagcagctctgtgagaaattgtcaaggtgatttgcaagaattcaagcccacaatcatggttggtgtcgccgctgtttgggaaacagtgagaaaagggatcttaaaccaaattgataatttgcccttcctcaccaagaaaatcttctggaccgcgtataataccaagttgaacatgcaacgtctccacatccctggtggcggcgccttaggaaacttggttttcaaaaaaatcagaactgccacaggtggccaattaagatatttgttaaacggtggttctccaatcagtcgggatgctcaggaattcatcacaaatttaatctgccctatgcttattggttacggtttaaccgagacatgcgctagtaccaccatcttggatcctgctaattttgaactcggcgtcgctggtgacctaacaggttgtgttaccgtcaaactagttgatgttgaagaattaggttattttgctaaaaacaaccaaggtgaagtttggatcacaggtgccaatgtcacgcctgaatattataagaatgaggaagaaacttctcaagctttaacaagcgatggttggttcaagaccggtgacatcggtgaatgggaagcaaatggccatttgaaaataattgacaggaagaaaaacttggtcaaaacaatgaacggtgaatatatcgcactcgagaaattagagtccgtttacagatctaacgaatatgttgctaacatttgtgtttatgccgaccaatctaagactaagccagttggtattattgtaccaaatcatgctccattaacgaagcttgctaaaaagttgggaattatggaacaaaaagacagttcaattaatatcgaaaattatttggaggatgcaaaattgattaaagctgtttattctgatcttttgaagacaggtaaagaccaaggtttggttggcattgaattactagcaggcatagtgttctttgacggcgaatggactccacaaaacggttttgttacgtccgctcagaaattgaaaagaaaagacattttgaatgctgtcaaagataaagttgacgccgtttatagttcgtcttaatggatcaacatttccatgataggaaagcctcatcatactaaagcactttttcagttttttgctttagaactgctaccaattataaaatagaatgcacaggttatcttgtttggtttgttattatccttttttcttctttaccagtcatatcacctcattcacgtatgttcgtaatttataatgttaaaaatggcatatatagatatatttatgaacatcctaaaaaataac

SEQ ID NO: 2961 - DNA, 841 bp, Saccharomyces cerevisiae
ggtaaaaatgaatgggcaaaatagctagccaagaacagcgcaatcattctaagattaacattgatgaactacagcgcagactctggtaatacagtttatgtggggaatatagatccaaggataacgaaagaacaactttatgaactcttcattcagatcaaccctgttttaaggattaagtatccgaaagataaagttctacaagcttaccaaggctacgcattcatcgaattttataatcaaggagatgctcaatatgcaataaaaataatgaataataccgttagattatacgaccgactgataaaggttcgtcaagtaaccaattctacaggaacaactaatttaccttcaaatatttctaaggacatgattctacctattgctaagttgttcataaaaaaccttgcagattcgatagatagcgaccaattagtgaaaattttcaataaatttggtaagctcataagggaacccgaaattttctacctatcaaacggaaaattaaagtgtgcttatgtttattttgaggactttgaaaaagcagatttggcaataaaatctttgaacaatcagttagtcgccaacaacagaattactgttgattatgccttcaaagaaaatggaaaaggtaacgcaaaatacggtgatgacgttgacaggctgttgaataaagaagcattaaagcacaacatgttgaaataagatcccgctctcacctagtacataccttacccgttagaaaatgcgataacggacacaatcttggcagaaacattatcaatactatgatatatatatatgcgtttccgactatactaatttttacactttttgaaaa

SEQ ID NO: 2962 - DNA, 2339 bp, Saccharomyces cerevisiae
aaatatttgtgtgctccaaataccggcaaataaaataacagacaatgccgtacagagtggcgacgggctacagtgaaaaaagtactgacgatgatttgatatggagaacgccaatagtaaaagaggaactcgaggatgctgacaactttttaaaggatgatgccgagttgtatgataaagtcaagaacgagagtgcagtatcacacctggataccatagttatgccgatcattttcacggtactgggcatgttcactagaatgtacaagattggtcgtaataatcatgtggtctgggatgaagctcattttggtaagttcggctcttactatctgagacacgaattttaccatgatgttcatccacctttaggtaaaatgcttgttggactgtctggttatttggctggctacaatggttcttgggacttcccatctggtgaggtttatcccgactatatcgattatgtgaaaatgaggttatttcaagcaatgttttcatcattgtgtgtgccactagcctatttcacaggaagggctatcggattttctaggctgagtgtttggctatttaccattctagtaatttttgagaattcgtatgcaacattaggcaagttcattctccttgattcaatgctacttttctttaccgtctcttcttacttttgccttgccaagttccatactatgagaaagtctcccttttcggctaggtggtggctatggttgtgcctcactgggttgaatttgggttgcgctatatctgtgaaaatggtaggtcttttcatcatcagtgtagtaggaatttacaccatcagtgaactatggaatctcctaagtgatagatcggtgtcttggaaggtttatgtcaaccattggctagcaagaatattcgggcttatcatcattcctgtttgcgtttttttgttatgcttcaaaatccattttgatctgctgtccaactcagggcccggcgactctaccatgccatcattatttcaagccagtctgaacggtacaaaagttggtaagggaccacgtgatgttgctttgggttcttctattatttccatcaaaaatcaagcgttgggaggcgctttattacattctcatgtccaaccattcccagaaggttctgagcaacagcaagtaactgtctatggttacagtgatgctaacaatgaatggttttttcaaagaatcagaggagtagagccttggactgatgctgagaacaagacaattgagtttgtaaagggtggcgaaatgtatagattaatgcatcgcctaacaggcaagaatctacacacccatgaagtcccagcgcctatatcgaaaagtgaatatgaagtttctgcttacggagatgtagacttaggtgactacaaagataactggattatagaaatcgtggaacaagtaggggaagaagatccaacactactacacccgctatccacatctttccgtattaaaaattctatactgggttgctatttagctcagtcaggtaaacatttaccagaatggggtttcaggcaaggtgaagttgtctgtttaaaacacgcctccaaaagggataagagaacctggtggaatatcgaaacacatgaaaatgaaagattgccacagggagaagatttcgtatatccgaagacttcattcttcaggaatttcatgcagttaaattcagcaatgatggcaaccaataatgctttggtaccaaaccctgaaaagtttgatggtatagcttcatctgcctggcaatggccaaccttgaacgtcggggtaagattatgcgaatggagtgaaaaatctataaagtacttcttattaggatctcctgcgtccgtctggccctcaagcatcgcagtttgcgcactgataatacacgttatattcttaactctgaaatggcagagacaatgtgttatcctatccgatccagtcgaacgtgacgtgttcgttatggcagccttttatccattgcttgcttggcttttacattatatgccattcgtagtgatgtcaagagttgtatacgctcaccactatctgcccaccctttattttgccttaatgatcttgtcatactacttcgatatgattaccaaacgttgggctacaagaaacactggaaaatttctaaggctaggagcttatattgtatacggatcaatcgtgatcgctggatttttttatttctctccttttagttttgggatggatggtccagtagatgattacgcgtacttggcatggctacctacgtggcagattgttgaagatatacgtaacacatagatatatagaatgatcaaaaacttttcttcacca

SEQ ID NO: 2963 - DNA, 5069 bp, Saccharomyces cerevisiae
gcaaggccaatcagagaacaaaaaagtctcgcaaagtcatttcacttttctcgcttgaaattattcgttcgatttctggctgcttgcttgttttttgttttctaaggtactattcgacaccattccattggacagcgatacttataccattgtacatataggacataaaaacagcagatattacagcgtataatgtcttttgaagtgggtacacgatgctggtatccccataaagaattgggctggattggggcggaagtaatcaaaaatgagttcaacgacggcaagtaccacctggagttacaattggaagacgatgaaatcgtgtccgtggacacaaaagacttgaataacgataaggaccaatctctaccgcttcttagaaaccctcccattttggaagcaacggaagatttgacctctttatcttacttgaatgagccagctgttttacatgccatcaaacagcgctattctcaattgaatatctacacatactcgggtattgttctgattgctacaaacccttttgatcgtgtcgaccagctttatacacaagacatgatccaagcatatgcgggaaagcgcagaggtgaactggaacctcacttgtttgccattgccgaagaagcgtataggttgatgaaaaatgacaaacaaaatcaaaccattgtggtaagtggtgaatctggtgctggaaaaacggtttctgccaagtatattatgcgttattttgcttctgtagaagaggaaaattccgctactgtacaacatcaagtggaaatgtcggaaacagaacaaaagattctagctacaaaccctatcatggaagcatttggtaatgctaagactaccagaaatgacaattcttccagatttggtaagtatctagaaattttattcgataaggacacatctattattggagcaaggatccgcacatacttgttggaacggtccagattagtttaccagccgccaattgagagaaactaccacatattttatcaattaatggctggattaccagctcaaaccaaggaggaattgcatcttaccgatgcctcagattacttctacatgaaccaaggcggtgacaccaagatcaacggtattgatgatgccaaagaatacaaaattacagtagatgcattgacattagtcggaatcaccaaggaaactcaacaccaaatatttaagatcttggccgcacttctgcatatcggtaacatagaaattaaaaaaactagaaatgatgcatcactatcagctgatgagccaaacctgaaactggcgtgcgaattgctgggaattgatgcctacaactttgccaaatgggtcaccaaaaagcagatcattacaaggtcagagaaaattgtttcgaatctaaattatagtcaagctctggttgccaaagattccgtggctaagtttatttattccgcccttttcgattggcttgtggaaaatatcaacaccgtgttatgcaacccggctgtgaacgaccaaattagctcatttattggtgttctggatatttatgggtttgaacattttgaaaaaaattcatttgaacaattttgtattaactatgccaacgaaaaactacaacaagagttcaaccaacatgttttcaaattagagcaagaagaatacgttaaagaagaaattgaatggtcttttatagagtttaatgataatcaaccttgtattgatctgattgaaaacaagttgggtattttatcactgcttgacgaagaaagtaggttacctgctggttccgacgaatcttggacccaaaaactttatcaaactttggataaatctcctacgaacaaagtattttctaaaccaagattcgggcaaactaaatttatcgtgagccattatgctctagatgtcgcttatgatgtggaaggatttattgaaaaaaatagagacaccgtatctgacggacatttggaagtgttgaaggcttctaccaacgagacactaataaatatcttagagggattagaaaaagctgccaaaaaactggaagaagcgaaaaagcttgaattagagcaggctggcagtaaaaagccaggtccgataagaacggttaacaggaaacccactttaggttccatgtttaagcaatctttgattgaactaatgaataccatcaactcaactaatgttcattatattcgttgtataaagcctaatgcagataaagaagcttggcaatttgataatttgatggtgttgtctcaactcagagcctgtggtgttttggaaactattagaatatcttgtgctgggtttccttctaggtggacttttgaagaatttgtattaagatattacatcttgataccacatgagcagtgggacctaatcttcaaaaaaaaggaaactacagaagaagatatcatatcagtggttaaaatgatcctagatgctactgtaaaggacaaatccaagtaccagattggtaatacaaaaattttcttcaaagcaggtatgcttgcatatctggaaaaacttagaagcaataagatgcataattcaattgttatgatccagaagaaaattagagctaaatattaccgtaagcagtatttgcaaatatctcaggccatcaagtatttgcagaacaacatcaaaggtttcatcattcgtcaacgcgttaatgatgaaatgaaagttaactgtgcaactttattacaggccgcttacaggggtcattccatccgtgccaatgtgttcagcgtattgagaacaattacaaatttgcaaaagaaaattagaaaggaactaaaacaaagacaactgaaacaagaacatgaatataatgctgcggtaactattcaaagtaaagttaggacctttgagccgagatcgagatttttacgcactaaaaaagacactgttgttgtccaatctttgatcagaagaagagctgctcaaaggaaattgaaacaattgaaggcagacgctaaatcagttaatcatctgaaagaagtgagctataaattagagaataaagtgattgaactgacgcagaatctagcatccaaggtcaaagaaaataaagaaatgacagaaagaattaaagaactacaggttcaagtggaagaaagtgccaagttacaagagacattagaaaatatgaaaaaagagcacttaatagatattgataatcagaaatctaaggatatggaattacaaaaaactattgagaacaatttgcaatccactgaacaaactctaaaggacgctcaattagagttggaggacatggttaaacaacatgatgaattgaaagaagaatctaaaaagcaacttgaagaattagagcaaacaaagaaaacattggttgaataccagacattaaacggagacttgcaaaacgaagttaaatctttaaaggaagaaattgctaggttacaaactgccatgtcgctgggcaccgttactactagtgtactacctcaaacaccattaaaggatgtaatgggaggcggtgcttcaaatttcaacaatatgatgcttgagaattccgacttatctcctaatgatttgaatctaaagtctagatctactccatcgtccggaaacaaccacattgattcattgagtgtcgatcgcgaaaatggtgtcaatgctacacaaatcaatgaagagttatacaggttattggaggacactgaaattttgaatcaagaaatcacggaaggcctgttaaagggattcgaagtaccggatgctggtgtagctattcaactaagtaaaagagacgttgtttatccggctagaatactgattatagttttaagtgaaatgtggagatttgggctgaccaagcaaagtgaaagctttcttgcccaagtattgactacaattcaaaaagttgtcactcaattgaagggtaacgatttaattccaagcggtgtattctggttagcaaacgttagagagttatactcatttgtggtgtttgctctaaactctattttaaccgaagaaacgttcaaaaacggcatgaccgatgaggagtataaggagtatgtttcattggtcacagaactaaaggatgatttcgaagctctaagttataatatatataacatttggctgaagaaattgcagaagcaattgcaaaaaaaggccatcaatgctgtggtcatctccgaatcattaccaggtttcagcgcgggagaaaccagcgggtttttgaacaaaatttttgctaacactgaagaatatacaatggacgacattttgacctttttcaacagcatatactggtgcatgaaatcttttcatattgagaatgaagtgttccatgctgtagtcacaaccttattgaattatgtggatgcaatttgttttaacgaattaatcatgaaacgtaatttcttgtcgtggaaaaggggtcttcaattgaactacaacgttactagattagaggaatggtgcaagacgcatggcttgacagatggtactgagtgcttacaacatttgattcagaccgctaagctactgcaagtccgtaagtatactatcgaagacattgatatcttaagaggaatttgttattcgctaacacctgcacaattgcaaaaattgatttcacaataccaggtggcagactatgagtctccaattccacaggaaatcttaagatacgttgctgatatagttaagaaagaagctgcgttatcttcatcaggtaatgattctaagggtcacgagcatagcagcagtatatttatcactccagaaacaggtccatttactgacccattcagtttgataaagacaagaaaatttgaccaagtagaagcctatataccagcgtggttatccttgccctcaactaagagaatagttgaccttgttgcccaacaagtcgttcaagacggccactaaaactgatggcgcgagaaacaaaattgtacatgaatgctaaaaaaagaaatgacaaaaaaagagaaaaaaaaaaatgaaactacatagttaattaataatagaagtatttgtcaatagtatgataatgaaatcgatattatggaagatattaa

SEQ ID NO: 2964 - DNA, 804 bp, Saccharomyces cerevisiae
cacagaacaggccacgcaccatccgatacagcatgtcctccgctattactgctttgacaccaaaccaagtgaacgatgaattgaacaagatgcaagctttcatcagaaaggaagctgaagaaaaagcgaaggaaatccaattgaaggctgaccaagagtacgaaatcgagaagaccaacatcgtaagaaatgaaaccaacaacattgacggcaacttcaagagcaagttgaagaaggccatgctttcgcaacagattactaagtcaacgatagcaaacaaaatgaggttgaaggttctttctgctcgtgaacagtcgctagacgggatattcgaggaaaccaaggaaaagttgtcaggaattgccaacaaccgggacgagtacaagcccattttgcaatcattgatcgtggaggcacttttgaagttgttggaacctaaggcgattgtcaaggctcttgaaagagacgtcgatttaatcgagtcgatgaaggacgacattatgcgtgagtatggggaaaaggcccagcgcgcaccattggaagagattgttatctccaatgattacttgaacaaagaccttgtttccggcggtgttgtggtctccaatgcatcagacaagattgaaattaacaacactttggaggaaagattgaaattgttaagtgaagaggcattgcccgccatcagattggaattgtatggtccttccaagacaagaaagttctttgattgatcgaccagcagcttgtatacctacatacttacatatacactcctaacagatttttttttgtatgttgttc

SEQ ID NO: 2965 - DNA, 4334 bp, Saccharomyces cerevisiae
gttagtatactaattaactaactatataacgtggcatattaaagattaattgtcctggtagaatatagacgtatcagtgtgagtgcctctgttgattatgagactacttgcgttggtattgttattgttgtgtgcgccgcttcgtgcatggacttatagcttacgatatggcatacccgaatctgctcaggtctggtctattttagttcatttactgggcgatgttgataatcagctgttaactaatttatatcctttggttaccggtttggatgacgagattgatattcaagaaaatcttgtggcgctaacttccaatgtattaagggagcgatacgataaagaggatgtggctgatttattggaactgtatgctagtctttaccctatgggtatgatacagcacgatatcagttccaatgcagaacaagacgatgcaaatagtagctatttcgttttgaatggtaataggtacgaaaagcccgacgacgtgttctacttgaaatctaaggatttaacaattcaacagaaagtcccagatgttgatgttatacaaccttacgatgttgtcattggtactaactcagaagcgccgatattgatcttgtacggttgtcctaccgttattgactccgacttcgaagaattcaataggaatttatttatggaagcaatgaatggagagggaaaatttagatttatttggagatccacatgttcccttgatgggaaaagcgtggagtatcccttaactcatccgcttgaaattactttacaaaatggttctagaatgagctccatacctcaattaaaaaaaatactatatactgtacccaaagaaatattggttggagcagacaacgatgatcagctccatgatctagaaccagaagaattacgtgaacttgatttgagagtaacatcgttaatctcagaattttaccaatataaaaaggatatcacagccactctaaatttcaccaaaagtattgttaacaactttccactaatctctaaacaactgattaaggtttcatctgttaacaaggatataataacaagtaatgaagaactcaatagtaaaggcttcgattacaacatgctaggtctctatattaatggacagaattggaaaattacctcactgactccgtacaatttgcttactgctttaaaaactgaataccaaagtttactgaaaattacgaaccttttgcaagaactcgagccatcgaaatgcatactagattccaagtttttactcaataagttttctcaattttcattggggaagttgcaaaacttacaaccaatcaaaatggatctccacacaattccagggttctcagaatcagtaatatacttcaatgatatcgaaagcgacccgcaatatgacgaattagtaaatagtgttcaagcattttttgataaatcgaaattcggagagttgcctgaaataaagcaaaactggtcagagatcatattcgttatagatttcgcccgtttagaagatagtgaggtgaaggaggcattgggtgggttggttcgtgccgttaatgttgtctcccagggatatccgcaaagagtcggactattgccatttagttcagatagtgacaagtccgttgttaataaaatttacgagctgaagaactcaactgacaatttaacagaattaaaaagttttttggagacaatgctgcttgcagatggcctttccgcgaatgcaaaacattcaaaacacataccagttccagatgttttccatctacttgatgaacttcaaattgacgaaacatcaattataatcaatggagagatttacccatttagaaaaaatgcttggaattatttaattgcaaaagttatcaaaaaggacactgaatttattcgtaaagaattgagcaattcttctccgaaaaacaaacaaattagcgtaagggacttattgcattacaaatctgcaaatctgagacataataaatatacaccaaattattttgctgattcggtatattcttcggtcaacaatactgcattggaaagcgtatgctcagaaagaataggctactatactaaaaatgaagaatacaatttattacacacaatcacattagtggatgattttggctctattcatgctttgaaaagattgagaaacttgttgcatacttcctttgttggtgttaggatcagaatcattcacgtaggtgatatttctgatatttggtatcaattgcgtggaagtctttcccaaaaagatccaataggctcaataaatacatttattgatgctttgaaacttaaaaaggtaaaaagtcacacgtacaaaaaaagcggcttaaaccagttaggccttcataaatggcttcctgacattccattatttgaattgcaaaagggttcatttattgctttgaacggtagatttattcatcttgatcaaaatgaagtgccagaaacagaacatttcgaagcaatcataaagagagaagctctaagaacgatcgattcagttttcgccctagatttactttttccaggtttctcacaggaaataatcaatcctgatttgatagaaatgatctcctccattttaactaggttgttttaccaaggtacacatatatacaataatggtattgattataccactgaaagtagcttaccaagaatggatttgagcgagttttttagacctaataatttaacgatgtttgaagatggaaaatcagcttctattgatttactactaattttagatccacttgaagagagaacgcaaatgattctttctcttgttgagcaattcaggcctttgaaatttgttaatattcaggtaattttaatgccgacactggaattaaacattgtccctattagaagaatatacgttgatgacgcagatattgtcaaatcaataacttctgaggatagcagatcagatccagaagtagatattgaaatggatgttcctaattctttcattgtagataataattatcggataaaaaaattgctcatagaattacattccttctctagcaaaacagtcctttcaactggcaatattgatggtatggggggtgtatgcctagcacttgtcgattctgcagggaacattattgacaaaactacaacaatgaaaacctttggctatggacaatttcataccgacaaatttttaaagggttgctatataaaaagttgtgattcaagatataccgttcagtcattttctactgacgggcatcccgactttataccatcagattccttggatatactgtcgtacaatccacaaaaaatcgctgtaaaaatttcagaagagcctacacacgaggaagaatacgaggaaggtcgcaacaatgatacaataatcaatatttttactattttagagtccgggccagatgaggaagagaggtacatgcaaatgattttatccattttgtcaaagtgtcccgaaacgcaaaaggtgaattttttcattttagatcagccgtttatctccgacactttaaggaaatcatgtgagtatataaattcctctgatgaaatgagaggcaatgtcatttttttgaattatgaatggcctcaatggttaagaccgcaaagattttcttcaaggagaagggatgtctctagatttctgttcttggatgtccttttacctcaaaacatctccaaagtgttatatatgagtccaactgaagtaccgctggatccttttgacatttttcaatttcaaggcctcaaacgtgcacctctaggactattccgaatgagtggtgatggttattggaaagaaggatactgggaaaaaatgttaagggagaataatttagaattttattctaccgaaccggcctttttagtaaacttagagaggtttcgggagttagatgctggtgataaatacaggattcactatcaacgtatttctacagacgccatgtctcttgtcaatatcggccaagatctagttaacaacctacaactcgaggttccgattaggtttctcaagggatcgtataagaagaaattagttattaatgatgaatgtgtttctgaatggaagaaaaaaataaataagttcgcatcctctcctggcgatgaagacgtacctggagaaagtgttagcagcaaataccaagattccgacaatgccgctcctctgcatgacgaattataactactcgcaggaagagttcattacgcgacggttccaagagcgtgaaagaattgcttctgcgcataagtcttcttccataatagatttttatatcatttttagaacataaaatttctcgccaagagttttttaagtaaaa

SEQ ID NO: 2966 - DNA, 2300 bp, Saccharomyces cerevisiae
atgacagcgccattgtggccaaacaagaatgaaaaaaaccacacagttaaaagagcgttatcaacggatatgaccagcaatattttgagtagcacaaacgcgagctcaaacgaagaaaattctaggagttcttctgcagccaatgtacgctccggaacaggtgcaaatacacttactaatggcggcagtactagaaagagacttgcgtgcactaattgtagaaatagaaggaaaaaatgtgatttaggatttccctgtggtaactgttccaggttggaattggtttgtaatgttaatgacgaggacttaagaaagaagcggtacactaataaatatgtcaagtctttggagagccatattgctcaactggagaccaacttaaaaaacctagttcagaagatctaccctgacgatgagcaaatactgaaccgaatgatggtaggtgatgtattatcagctctaccagacagttcacaagtctcaatcaattatactgaccaaactccctctcttccaattcccgcaaccagaggtacattcattattgaaaacgataaggtcagtcaacctctatcgtcctttaaccaacaaacagagccatctactctaaactcgggtatcttcaacacccaaaaacaaaatttcgaagaatcccttgatgatcagttacttttacgaagatcgttaacaccgcaaggtgaaaaaaagaagaaaccgttggtaaaaggtagtctttatcctgaaggacctgtcagttacaaacggaagcaccccgtaaaatcggacagtttattgcctgtgtcttcgttaacagctgctacagacccatctactttttctgacggtataactgctggtaattccgtcctagttaatggtgaactgaaaaaacgtatatccgacttgaagaccaccgtaatagtaagaggactaaacgatgataatcccaactctatcaataacgatcccaggattttaaaatctctttccaatttctataagtggctgtatccaggttattttatttttgttcacagagaaagttttctttatggattcttcaatcactccaagaataactatgaagactcaagttactgttctgtcgaattgatatatgccatgtgcgctgtcggttcgaggcttacaccggatctacaagaatattcagaagtgtattatcaacgaagtaagaagactttattacagctcgtctttgatgagcaaagtacagcccgtatcaccaccgtccaagcgctattttgcttagccttttacgaactggggaagggtaataatcaattagggtggtacttctcgggcctggctatcagggtcggctacgacatgggatttcaactggaccctaaagtctggtacgttgatgataacaatctgcagctgacccaaagtgagttggaaataagatcaaggatttactggggttgctatatagcggatcattttatttgcctgatgttgggtagaacgtccacattaagcgttagtaactcaaccatgccagagtcggatgagctgccagaagtcaacggcaccgaagagttcagatttattggaagacatgttttacagatatccttgcctctgaaaaacttgataattctatcaaggcttgtacaaatcttcacctctaaaattttcatcgagtcggaagatatagcacgaaaactaaagtacttgaacactttcaattctcaggtttacaactggagacaatctctaccggaatttttgcaatggtcgaaaacactcatcgagaacgatgacgtatccacagaccccactatatcttacttctggtattgctactacatagtgcggctcacctttaacaagccatttatagaagactctcaagaatccgaaacggtagtcatagagatcatcgatgatttgaagactttgctggacaatttcgggaaaaaattcggaaactacacgaagggaaacctttaccaactttactcatgcctgttggccatcaactgtttgaagaagttgaaagagatacgttccagtgagcaagactcatggaatgcacaattggattttttcaatcacatcttctacacacaactatatcccgcatatgatctgccgaaaaagctgcaggaggatacggagctggaaacagaacaagaaaaccagatgttgaaccaagttggaaatataaactacacgcacgatttttcactctcccacgaaattgacgatcttatcagagaactgtttggggtgggcacacctcaaaaactctgacgatctttatatttgtcacc

SEQ ID NO: 2967 - DNA, 5379 bp, Saccharomyces cerevisiae
aataattctggtcttaggtatccattaactatacagtgaactttatcctttttctgctttttttttgccgtacttcgattataatcaaagccagaaagaaaaatggatatttctaaaccggttggttctgaaatcacatccgttgatttcgggatcctaacagctaaagagattagaaatctatcagcaaagcaaattaccaatcctacggttttagataacttaggtcatccagtatcaggcggtttatatgacttagccttaggtgcattcttaaggaatctgtgttctacttgtggtttggatgaaaaattctgtccaggtcaccaaggtcacattgaattacctgtcccttgttataatccattgttctttaaccagctatatatttatttgagggcatcatgtttattctgtcatcatttccgtttaaagtcagtagaggttcatcgttacgcatgtaaattgagattgttacaatacggtttgatagacgaatcttacaaactagatgaaataactttgggctctcttaatagcagtatgtacactgacgacgaagctattgaagataatgaggatgaaatggatggtgaaggaagcaagcaatcaaaggatatttcctccactctcttaaatgaactgaaaagtaagcgttcagaatatgttgacatggccatcgctaaagctttgtcagacggcagaactactgagagaggctctttcacagctactgtaaatgatgaacgaaagaaattggtccatgagtttcacaaaaaactattatctagaggtaagtgtgataactgtggtatgttttcgccaaaatttagaaaggatggttttacaaaaatcttcgaaactgcgttgaatgaaaaacaaattacaaataacagagtaaaaggtttcattcgtcaagatatgattaagaagcaaaaacaggctaagaaattggacggttctaacgaagcatctgcaaatgacgaagaaagttttgacgttggtagaaatcctaccaccagaccaaaaaccggctcaacatatattttatctactgaagtgaagaatattctggacactgttttcaggaaggagcaatgtgttttacaatatgtttttcattcgagacccaatttatcaagaaaattggtcaaggctgactctttttttatggatgttcttgttgtgccaccaactagattccgtttgccttccaagcttggtgaagaagttcatgaaaactctcaaaaccaattgttgtccaaggttcttactacgtcattattaattagggacttaaatgatgatttatctaagctacaaaaggacaaagtttctttggaagatagaagggtgatcttcagtaggttaatgaatgcctttgttactattcaaaatgacgtcaatgcttttatcgactctaccaaagcacaaggtagaaccagtggtaaggttccaattcctggtgttaaacaagcactggaaaagaaagaaggtttattcagaaaacatatgatgggtaagcgtgttaactatgccgctcgttctgttatttctccagacccaaatatcgaaactaatgaaattggtgtcccacctgtttttgctgttaaattgacttatccagaaccagtaacggcttataacatagcagagttgcgtcaagctgttattaatggccctgataaatggccaggtgccactcaaatacagaacgaagatggttctttggtctctttgatcggtatgtctgtagagcaacgtaaggcattagctaaccaactattgacaccatcttcaaacgtttctactcatactttgaataaaaaggtttaccgtcacatcaagaacagagatgttgttttaatgaaccgtcaaccgaccttacataaagcctccatgatgggtcacaaagttagggtgttaccaaacgaaaagactttgagattacattatgctaatacaggtgcttataatgcagatttcgatggtgatgaaatgaacatgcattttccacaaaacgaaaatgctagagcagaagcactaaacttagctaatactgattctcaatacttgacaccaacttctggttctccagttagaggtttgattcaagatcatatttctgcgggtgtttggctaacaagtaaggacagttttttcaccagagaacaataccagcaatatatttacggttgcatccgtcctgaggatggtcataccacaagatcgaagatcgttaccttacctccaactatcttcaagccatatccattatggacaggtaaacaaatcatcacaacagttttgttgaatgtcacccctccagatatgcctggtatcaatttaatttctaaaaataagattaaaaacgaatattggggcaagggatctctggaaaacgaagttctcttcaaagacggcgcattgctatgtggtattttagataagtcacaatacggtgcctctaagtatggtattgttcattcattgcatgaagtttatggcccagaagtcgctgctaaagtcttatccgtcttaggtagactatttaccaactatatcactgccacggcattcacttgtggtatggacgatttacgtctaacagcagaaggtaataaatggaggactgacatcttgaagacgtctgttgatacaggtcgtgaagccgctgcagaagttactaatttagataaagacacgccagcagatgacccagagttattaaagaggctacaagaaatactgcgtgataataataagtcaggtattcttgacgctgttacatcctccaaggtcaatgctattacttctcaagtcgtctccaaatgtgttccagatggtactatgaaaaagtttccatgcaattctatgcaagctatggcactttctggtgctaaaggttctaacgttaatgtttctcaaattatgtgtttgttgggtcaacaagctttagaaggtagaagagtgccggtaatggttagtggtaaaactctgccttctttcaaaccttatgaaacagatgccatggctggtggttatgttaagggtcgtttctactctggtataaagccacaggagtattacttccattgtatggctggtcgtgaaggtttaattgatacggccgttaaaacatctagatccggttatttgcaacgttgtctaacaaaacaattagaaggtgttcacgtatcatacgataacagtataagagatgcagatggtacgttagtgcaattcatgtatggtggtgatgccatcgatataaccaaagaatcacacatgactcaattcgagttctgtttagacaattactacgcattattgaagaaatacaacccatcagcactgattgaacatttggatgttgaatcagctttgaagtactctaaaaagactttgaaatacagaaagaagcatagcaaggagcctcattacaaacagtctgtaaaatatgatcctgttttagctaagtataatcctgccaaatacctgggttccgtttctgagaacttccaagataaactagaatctttcttagacaagaactctaaattgttcaaatcatcggatggtgttaacgaaaagaagttcagggccttgatgcaattgaagtatatgcgttctctaattaatccaggtgaagctgttggtattattgcttcacaatctgtcggtgaaccctcaacacagatgacattgaataccttccactttgctggtcacggtgccgctaatgtgacactaggtattcctcgtttaagagaaattgttatgactgcctctgctgccattaaaactccgcaaatgactttgcctatctggaatgatgtttctgatgagcaagctgacactttctgtaagtctatctcaaaagtcctattatccgaagtgatagataaagtgatagtcactgaaactaccggtacttcaaataccgctggtggaaatgcagctcgttcgtatgttatccatatgagattcttcgacaataatgaatacagtgaagaatacgatgtttctaaagaagaattacaaaacgtcatatctaatcaattcatacacttgctagaagctgctattgtaaaagaaatcaaaaaacaaaagagaactacaggaccagacattggtgttgcagtaccaaggctacagacagatgttgcaaatagttcttcgaactctaaaaggttggaagaggataatgatgaagaacaaagtcataagaaaactaaacaagcggtttcgtatgacgagccagatgaagatgaaattgaaactatgagagaagctgaaaagtcttctgacgaagaaggtatcgattccgataaagaaagtgattctgactctgaggacgaagacgttgacatgaatgaacaaattaataagagtattgtggaagctaacaataatatgaacaaagtgcagcgtgatcgtcaatcagcgattatttctcatcatagattcatcaccaaatacaatttcgatgatgaatctggtaaatggtgtgaatttaagctagaattagcagcagacacagaaaagttgttgatggttaatattgttgaagaaatctgtaggaagtctatcattagacagattcctcatattgaccgttgtgttcatccagaacctgaaaacggaaaacgtgtccttgtcacagaaggtgttaatttccaagctatgtgggatcaagaggcatttatcgacgttgatggtattacatctaatgatgttgctgctgtgttgaaaacgtacggtgtagaagctgctagaaatactattgtgaatgaaattaataacgtcttctctcgttatgctatttctgtttctttccgtcatttagaccttattgctgacatgatgaccaggcaaggtacttacttagcctttaacagacagggtatggaaacatccacttcatctttcatgaagatgtcctatgaaactacatgtcaattcttgaccaaggctgttctagataatgagcgtgaacaattggacagtccttccgctagaattgtggtgggtaaattgaacaatgttggtacgggttcatttgatgtgttagcaaaggttccaaatgcggcttagaagcaggcaaaaggtcccataattattacgatttaatattagtttatttgaaggagaaggtcagaagaaaagagagaaaaatgcacaatgggtagcgccattaaaaaatacctcttttggtatttgtctggtttcctatttcttcttgcgcgtgtgttatgtaaattaagagagctagggtattataaagtgcatcatcatcaagcggatatgtaacgcatatacattatatatgtgtagtgagttctttataccctacaaatttgatattgtgtttattta

SEQ ID NO: 2968 - DNA, 1851 bp, Saccharomyces cerevisiae
caaattttttttacttttttttttgctttgctatagtattttagaaaaggacaaaaaaatacgaaaaaagacaaaaaaccatataaaaaaattgattagaagaacttataatggcattggcaaattccagacctttgcaaataccaactttagagaatgaaattcttcataactcaaattctccagtatttcagttgaattcaatgggatttacaactagagctgacactatttcgaatccaggcacggatcttatcggcaaccagccaggcatggcccttgatgataataatttggccggttcttcgttttcctcatctcaggaaataaaagctaccaaacctaagaaggactttggtgctcccaaaaaagacaatccattattagaaatttctaagctaatacctgttactggtgagaggccaaaacccgaaaatagagactcccctctggatgatgacgttcttcacgcagtttttttaatattatgggaaatggatccgaatcaacaaggcatgaccgtcaaacaactgtgtgacttgcttttgcaaaaacatccagatatgtccaatttatcaaccaagttgtcaaatttaatttccgcaaaactgaacgcttatgttaaaaaaattgaaaaaggtgagaaaacgttaacttatgctttatcaagggaatggtctaattcatctcctagaaggatgctctatatatacagaggcatattatctcccgattacaaggagcatgctcaagctgttacgatgcaacttaaacaacaattggagacctccggtgatacaagcgactttaattcaaatggcaagaaaaaaagggagtccagcagtaaccagctagttaacaatgacagttattcaagttctatgacggacatgaaaaatatgtcttctaacagttccttctcaaaaaatttgaatgtagggaatctggccttttcattaagtccagaattcaacataccttattccacttctccagtgtcactaaatctttccccatcgatgagtaataatcagcaacaattactgacacctaattcggcatcgaagagtaaaaacaataataaaaaaagaaattacatggatgaagatactaacgagtcaatgaccgagccaaagaaaaccaaaactactaaacctggcaaacaaacaaaatcccaatctttatcagttttatccacccccaaaaagggttcctctgcatctctttctacatttgcaagctccaagaatatttcgccagattcttctctgtcgcataatgcatcgtcaaatacttatgttactgccgctgccgctgcaccaaggctttctaagcttttgccgaaaaatgggtttaagaaaaattcacgtagctcttctgaactggctgctatccataaagtaatctctacacagactccaattgagagctcttcagagagctctcaatataacagtagtagtagttcaccagttaatagtgcagctgcttcttctgctgaatctttatccgacatcaattccagtcaggataacggaagagaatcaaacccaagttcccaagaatcacgaaacgaagttacgaattggatgaaaattgtgagaaatggatttttgacacatgatattgaatctcctgaatcaatcacattagatgacctagaaaatatattcaattgatttttatctccctttacaagagcataacggctgctctacacctatgtcgttgtttttttttatcaactaataatatgtgttcctctcatttggacaatttttagctagttctaactttcactacaatatttaaataaataaacaaccataaataaataaatgaaaaacaact

SEQ ID NO: 2969 - DNA, 2095 bp, Saccharomyces cerevisiae
gttatatacttactgttacttcaggccacataaaagaacaaacttaagctagacaggaaaatccactctgggaaagggaaaatgattaagttcactaacgagaacttaattagagggatccgaatgacgatttccgcaaaatctcgtcatttggctctagggacagatatgacgagaaagtttagcttgtcgtgtaggtttttgaacaaagcaaatcttactgaagaagagaaagagttgttaaatgaaccaagggcgcgcgactatgtggatgtttgtatagttggaggagggcctgcgggattagcaacagcaatcaaattaaaacagttagacaattcgtcaggaacaggccaattgcgtgtcgttgttcttgaaaaatccagtgtattgggtggacaaactgtttccggcgctatattggaaccgggagtgtggaaagaactattccctgatgaaaagtctgacattggcattccgttaccaaaggagttagctacgttggtaactaaagaacatttgaaatttttaaaggggaaatgggcgatcagcgttccagaaccatctcaaatgatcaataaaggacgtaattatattgtctctttgaaccaagtcgtcggatatttaggagaaaaggcagaagaagtaggagttgaagtttaccccggaatagctgtctcggatctcatatatgatgaaaacaacgccgttaagggtgtaattactaaagatgctggtatttcgaagtccggtaagcctaaggaaaccttcgaacgtgggatggaattttgggctagacaaactgtattagcagagggctgtcatggttccttaacaaaacaagccttggcaaaatatgatttaagaaaaggcagacagcaccaaacttatggattaggtattaaagaagtttgggaagtcaagccggagaattttaacaagggatttgcagctcataccatggggtacccgttgacaaatgatgtttatggcggtggtttccagtaccattttggtgatgggctggtcactgtgggccttgtcgtggggttagattataagaatccctatgtttcaccttacaaagagtttcaaaagatgaaacatcatccatactattcaaaagttttagaaggaggtaagtgtatcgcttatgctgcaagagcattgaatgaaggtggactgcaatctgtacccaagttgaatttccctggtggtgttttggtaggggctagcgcgggtttcatgaacgttccaaagatcaagggtactcatactgcgatgaagagtggattacttgccgctgaaagtatctttgagtccataaaagggttacctgtcttagaagaggttgaagacgaagacgccaaaatggctatgtttgataaggaggcaactattaacttggaatcatatgaaagtgcattcaaagaatcatcgatatataaggaactatacgaagtgcgtaatattagaccgtccttcagcgggaaacttggtggatatggtggtatgatctactctggaatcgattctttgatattgaagggaaaagttccgtggacactgaaatttgatgaaaaaaatgacggtgaaattttggaacctgcttccaagtacaaaccgatagaataccccaagcctgatggtgtgatatcctttgatatattgacctccgtgtctagaaccggaacctaccatgatgatgatgaaccatgtcacttgagggttcctggacaagatatggtaaagtacgccgagagaagctttcccgtttggaaaggtgttgaatcgaggttctgcccagcaggtgtctacgaattcgtcaaagatgaaaaatcgcctgtgggtacgagactgcaaatcaattcacaaaattgtatccattgcaagacctgtgatattaaggcgcccagacaagatattacttggaaagtacccgaaggtggagatggaccaaagtacacgctaacttaatcacaggattcattatttatttaattattttattcattatttatttaaatttttctattcattcttttatataatctatattatttattcacgtaaaagagttcttttcagccgacaa

SEQ ID NO: 2970 - DNA, 1923 bp, Saccharomyces cerevisiae
ttcgtcccttgggcaatctagatcactgtatatactatagatattgttttcagaagagaaaaactgttcatataaagtaattgtcagcaaagaaatcatgaaacatccgtatgaggaattccccacaggttccaagtcaccatataacatgtctagaggagctcatccaggcgccgttttgctatcaccacaatcttctgccataaacaagaacaatccgggcagcaattctggcaataaccagggcaattcatccgtgaccgcgaatgttttgtcccctcaatcccatagtatgtcactcaatgacatgcttgatcagcaatcctttatgctagacactgcgggaaccagggctcagccgctccagcaacaacagcagcagcaacaacagcaacagcaggcgtcgttgccttcccttaatattcaaacagtttcgtctacagcagctggttctgctatcgtttcccccatgatgcaatctccaaaggcgttgcaatctactttatcttcaacatctatgtatttggattcatttcagagatctccaaataatattttgggtattccatcgcagagtggttcaattcctttgccgcaatcccgtcaatcgcaacaacagtctcaatcccaaaaaaacgatccgaacatgggcaccaatttcagccaagacatcaaccaattatgttcttggatatccatgctgaacagcagccaacaaaatactgtaatggacaatatcctttccattttgaatgatgatgttttgaaatatactaagttaaaaatagagactttgacaaacactcccttcatctccccaccgctacctgcaattgcatcacctatacctaatagggatgacacacaaattttgaatattgattcagtcttttcttcaagtcctataactaatgaccctgaaaataccgataacttgttgtatcaaaattggtcccctcagccacattcaataccaattagccaacccatatatgacaacatcaccgacgctagtcaaaggtccaagtcggctgagcctcatgttaattcaagcccaaatctcattcctgtccagaaacaattcaacaacggtaacagtaccaaatataaaaagttgccatcagagaatcccaactatctttctcactctctctcaagttcccattcttttttccaaccaaagaaaaggtctaacatgggaaatgagtacaattctcatcaccatcattcattgcatcatcctctgcataataccacctcatatttttcgaatacttcaagaccatcaggaactgatttgaataagtccaaccagaacgtgttcaataataccattacgcatcctaatgctggtcctacaagtgccacatcgacatctacatcatctaacggaaacactcctttatcgagtaactcttcgatgaatccaaagagtttgacagaccccaagctactaaaaaatatacccatgtggttaaaatcgttaagactacacaagtattcagatgccttaagcggaaccccgtggatcgaattgatttacttagatgacgagactttagaaaaaaaaggcgttcttgccttgggtgcaaggagaaaattgttgaaggcttttggaatcgttattgattacaaagaacgtgatttaattgatagatctgcttattaaatctggcataataaagttgattgtcttgacgttgcataaagatttaatttttatttactttgcatataccaacacagggaacatatttcatttattttgtaattttaacgttttcttttatggagtttaatattttagattacacctgtttttgcaccgtttaatggcataaaactatttacttaacttttaactcgggaaatatgtatcactatactaaaaaacattaatttaatcaaagaaaaataaattta

SEQ ID NO: 2971 - DNA, 681 bp, Saccharomyces cerevisiae
agctaaagtttaccgatgagttacgataagaaggcagatgtcacatccttagatgaagatttgagacaactaagagaaagcaaattttcaccggaagcaattcaaaatatcaaaatatgggtatataaatctgtcctaaaagagatagctcctcctggagacttattggaatgcttgaaagatggaacagtcctatgtaagctggcaaatattttatatgaagcagacacaggagaagctaaccatattagttggaagagctctaaaatgccatttgttcaaatggatcaaatttcccaatttttatcattttcgagaaaatatggtgtgcctgaagatgaactgtttcagacaattgatctttttgagaaaaaggatcctgccattgttttccaaacgttgaagtcactatctcgttacgccaacaaaaaacatacagatagatttccagttctaggaccacaactgtcaacaaagaagccaagacccccggttaagtctaaaccaaaacatctacaagatggtactggatggagcacttttgaatacggttatatgaaaggtgcatctcaggctactgaaggagtggtgttaggacaacggagagatatagtttagagaattattattaacactttctctggcagaaattgataaataaacatttaagaaccctatata

SEQ ID NO: 2972 - DNA, 1825 bp, Saccharomyces cerevisiae
accaaccaagaaaactacaataacaaaaataaataaagcatgttcagtagatctacgctctgcttaaagacgtctgcatcctccattgggagacttcaattgagatatttctcacaccttcctatgacagtgcctatcaagctgcccaatgggttggaatatgagcaaccaacggggttgttcatcaacaacaagtttgttccttctaaacagaacaagaccttcgaagtcattaacccttccacggaagaagaaatatgtcatatttatgaaggtagagaggacgatgtggaagaggccgtgcaggccgccgaccgtgccttctctaatgggtcttggaacggtatcgaccctattgacaggggtaaggctttgtacaggttagccgaattaattgaacaggacaaggatgtcattgcttccatcgagactttggataacggtaaagctatctcttcctcgagaggagatgttgatttagtcatcaactatttgaaatcttctgctggctttgctgataaaattgatggtagaatgattgatactggtagaacccatttttcttacactaagagacagcctttgggtgtttgtgggcagattattccttggaatttcccactgttgatgtgggcctggaagattgcccctgctttggtcaccggtaacaccgtcgtgttgaagactgccgaatccaccccattgtccgctttgtatgtgtctaaatacatcccacaggcgggtattccacctggtgtgatcaacattgtatccgggtttggtaagattgtgggtgaggccattacaaaccatccaaaaatcaaaaaggttgccttcacagggtccacggctacgggtagacacatttaccagtccgcagccgcaggcttgaaaaaagtgactttggagctgggtggtaaatcaccaaacattgtcttcgcggacgccgagttgaaaaaagccgtgcaaaacattatccttggtatctactacaattctggtgaggtctgttgtgcgggttcaagggtgtatgttgaagaatctatttacgacaaattcattgaagagttcaaagccgcttctgaatccatcaaggtgggcgacccattcgatgaatctactttccaaggtgcacaaacctctcaaatgcaactaaacaaaatcttgaaatacgttgacattggtaagaatgaaggtgctactttgattaccggtggtgaaagattaggtagcaagggttacttcattaagccaactgtctttggtgacgttaaggaagacatgagaattgtcaaagaggaaatctttggccctgttgtcactgtaaccaaattcaaatctgccgacgaagtcattaacatggcgaacgattctgaatacgggttggctgctggtattcacacctctaatattaataccgccttaaaagtggctgatagagttaatgcgggtacggtctggataaacacttataacgatttccaccacgcagttcctttcggtgggttcaatgcatctggtttgggcagggaaatgtctgttgatgctttacaaaactacttgcaagttaaagcggtccgtgccaaattggacgagtaaggtcatcaataagcctggtgtccaatcgatgcttacatacataaaattaaatattctgtctctgttatatttccacatgtcatcatttcaaatatatgtactttaaagaaaataaaataaaaaataaaatttttttctcccgataatcaattttcttaattaattaattgcgttacgattccgtttttttacttcttttatctcattatctatctaagttatttaa

SEQ ID NO: 2973 - DNA, 1894 bp, Saccharomyces cerevisiae
ccaacccaacaaaaattcgagacaagaaaataaaaaacggcacttcatcagtatcacaaataccatcaatttatcagctctcatgaatgaaatcgatgagaaaaatcaggcccccgtgcaacaagaatgcctgaaagagatgattcagaatgggcatgctcggcgtatgggatctgttgaagatctgtatgttgctctcaacagacaaaacttatatcgaaacttctgcacatatggagaattgagtgattactgtactagggatcagctcacattagctttgagggaaatctgcctgaaaaatccaactcttttacatattgttctaccaacaagatggccaaatcatgaaaattattatcgcagttccgaatactattcacggccacatccagtgcatgattatatttcagtattacaagaattgaaactgagtggtgtggttctcaatgaacaacctgagtacagtgcagtaatgaagcaaatattagaagaattcaaaaatagtaagggttcctatactgcaaaaatttttaaacttactaccactttgactattccttactttggaccaacaggaccgagttggcggctaatttgtcttccagaagagcacacagaaaagtggaaaaaatttatctttgtatctaatcattgcatgtctgatggtcggtcttcgatccacttttttcatgatttaagagacgaattaaataatattaaaactccaccaaaaaaattagattacattttcaagtacgaggaggattaccaattattgaggaaacttccagaaccgatcgaaaaggtgatagactttagaccaccgtacttgtttattccgaagtcacttctttcgggtttcatctacaatcatttgagattttcttcaaaaggtgtctgtatgagaatggatgatgtggaaaaaaccgatgatgttgtcaccgagatcatcaatatttcaccaacagaatttcaagcgattaaagcaaatattaaatcaaatatccaaggtaagtgtactatcactccgtttttacatgtttgttggtttgtatctcttcataaatggggtaaatttttcaaaccattgaacttcgaatggcttacggatatttttatccccgcagattgccgctcacaactaccagatgatgatgaaatgagacagatgtacagatatggcgctaacgttggatttattgacttcaccccctggataagcgaatttgacatgaatgataacaaagaaaatttttggccacttattgagcactaccatgaagtaatttcggaagctttaagaaataaaaagcatctccatggcttagggttcaatatacaaggcttcgttcaaaaatatgtgaacattgacaaggtaatgtgcgatcgtgccatcgggaaaagacgcggaggtacattgttaagcaatgtaggtctgtttaatcagttagaggagcccgatgccaaatattctatatgcgatttggcatttggccaatttcaaggatcctggcaccaagcattttccttgggtgtttgttcgactaatgtaaaggggatgaatattgttgttgcttcaacaaagaatgttgttggtagtcaagaatctctcgaagagctttgctccatttacaaagctctccttttaggcccttagatctcacatgatgcttgactgatattattcgacaatatgattatgtcgtgtaaataacccactttcatgttgtcactccctcggctttggttggttaaagggacttatcggtttctttttttagagttgatttaagatcagatcgaagtaaataacgtgcagaacattgcatatgatagataacaacctatagtatatatttcaaaatcgcgacaaatctgaaatattaattga

SEQ ID NO: 2974 - DNA, 598 bp, Saccharomyces cerevisiae
gtaaaaaagtctatcataaagccatcacaaaacaataataatgaaattctcaactattttcggagctactacagttatgactgccgtctcggcagcagctgtgtcgagtgtaatgaccactaagactattactgctactaacggtaataacgtttacactaaggtcgttaccgacaccgctgaccctatcattagttacagtaccactagaactgtcgttgtcagtaatagtgatgctacttacacaaaggttgtcaccgaaggaccagataccacctctgaaaagagtacaacaaagacacttactttgacaaacggttcaggttcatcaaccaacctttacaccaagaccgtcactcaagccgtcgaatcatctacatcctcctcatcctcctcatcctcctcctcctcttctgcctcttcttctggtgctgctcctgctgcattccaaggagcaagtgtcggtgcattggcccttggtttgatttcttacctattataagctcggtttcaaaccagaaaaaagctattagttatcgtgtatagcatatttataacttatctatgaaaagctaatataattgtctttctccttcaa

SEQ ID NO: 2975 - DNA, 1015 bp, Saccharomyces cerevisiae
aaaacggaagataagtgaccaagataatggcaaaaccgcgtggaagaaaaggcggcaggaagccttcacttactccacctaaaaataagagagctgcgcaacttagagcatcccaaaacgcatttagaaaacgaaagttggaaagattagaagaactagagaagaaagaagctcagctaacggtaacaaatgatcaaattcacatattaaagaaggaaaatgaacttctccattttatgttgaggagtcttttgactgagaggaacatgccttctgatgaacggaacattagtaaggcctgttgtgaagaaaaaccgcccacatgtaacactctcgatggtagtgtggttctttcctccacatataattcccttgaaatacaacaatgctacgtatttttcaagcaactgctctcagtgtgtgttggaaagaattgtacagtgccgtcaccgttgaattcctttgatcggtccttctatcccataggctgtacgaatctctcaaatgacataccaggctattcttttctaaatgatgcaatgagtgagattcatacgtttggtgactttaatggggaacttgatagtacctttttggagtttagtgggactgaaataaaggagccaaataatttcattactgaaaacactaatgcaatagaaacagcggcagcgagcatggtgattaggcagggtttccatccaagacagtattatacagtggatgcttttggaggggacgtcctattaagtgcgatggatatttggagttttatgaaagtgcatccaaaggttaacacatttgaccttgaaattttgggaacagaacttaagaaaagtgctacgtgttctaattttgatattttaattagcctcaagcatttcattaaggtcttttcgtcaaaattataatattcttcctgtaagcacagcgcaacattgtctttcttattgttaatatataagttaaaagccgaatttttcatttatttatatagatggcgtgaagattatta

SEQ ID NO: 2976 - DNA, 2101 bp, Saccharomyces cerevisiae
ctgacacaggaatagggaaaaatttttgttgagcaagatccaaatggacgagttactgggagaagcgcttagtgcagagaaccaaacaggtgagagcactgtcgaatctgagaagttggtcacccccgaagatgttatgaccatatcatccttggaacagagaaccttgaatcccgatttgtttctttacaaagagttggtgaaggcacatctgggtgaaagagcagcttctgtaattgggatgttggttgcgctgggcagattgagtgtgcgcgagttagtggagaaaatagatggtatggatgtagacagcgtcaagacgacactagtctcattaactcaattaaggtgtgttaagtacctgcaagaaacagcaatatccgggaaaaaaacgacttattattactataacgaggaagggatacacattttactctactcagggttgattattgacgaaattattacgcaaatgcgtgtaaacgacgaagaggagcataaacagctggtggctgaaattgtacaaaacgttatatcattagggtccttaacagtggaagattatctaagtagtgtcacgtcagattccatgaagtacaccatttcatcactattcgtgcaactgtgtgaaatgggatatcttattcaaatatcaaaattgcattataccccaatcgaagatctctggcaatttttatatgaaaaacattacaaaaatattcccagaaactccccgttgtccgatttgaagaaaagatcccaagccaagatgaatgcgaaaactgattttgccaaaatcataaataaaccaaatgagctttcacaaatcttaacggttgatccaaagacctcattgaggattgttaaacctacagtctctctgacgattaatttggatagatttatgaaaggtagaagatctaaacaattgattaacttggccaagacaagagtcggctccgtcacagctcaagtttacaaaattgcattaagactcacagagcaaaagtctcctaaaattagagatccactaactcaaactgggcttttacaagatttggaggaagcaaaatcgtttcaagacgaagccgaacttgttgaggagaagacaccagggcttacctttaatgctattgacttggcaagacatctccccgcagaattggacttgcgtggaagcttattatctagaaagccctctgacaataaaaagcgttctggctcaaacgctgctgcatcattacccagtaaaaaattaaaaaccgaagatggatttgtgatcccggcgctacctgctgctgtttccaaatctcttcaagaaagtggagatacacaagaagaagacgaagaggaggaggatttggatgcagacactgaggatcctcactcagcttctttgataaatagtcatttaaaaatcctagcatcatcaaatttcccctttttgaacgaaaccaaaccaggtgtttactatgttccatatagcaaactaatgccagtattaaagtcatctgtttatgagtatgttatcgcgtctacgttgggaccctcagcaatgcgtttaagccgttgtattcgtgataacaagctggtgtctgagaaaattatcaactcaactgcgttaatgaaggaaaaggatataagatctacattagcatctttaattagatacaattctgtggaaatccaggaagttccaagaacagccgatagatcagcatcaagggcagtttttttgtttagatgcaaagaaacgcattcctataatttcatgagacaaaacttggaatggaatatggcaaatttactttttaaaaaggagaaattaaagcaagaaaactctacattattaaaaaaggcaaatagagatgatgttaaaggaagagagaacgaactactattaccaagcgaattgaatcaattaaagatggtcaatgaaagagagctaaatgttttcgctcgtttatcgaggttgctatcgctttgggaagttttccaaatggcatgattactctatacagctgataaactctgtctaataaccttttatactctatagaaaagataaaatttattactaatgttacattaaggtttgatt

SEQ ID NO: 2977 - DNA, 714 bp, Saccharomyces cerevisiae
tttcgaatcgtttattgagcaaacttgaagtagatatggaccatagtgaatcgctaacgtttaaccaacttacgcaggactacataaataaactcaaagatgctttccaaatgctggatgaggatgaggatggtctgattagtaggggagatcttaccaagatatatgcaacattggggaagacattgacagatgaggaatggtccaaaatggtacctgacaatgacaccagtaccgcggaagttggagaagaaggtgtaagctttcccatattcttatctatcatggggaagaacttatcgcagtttcccgagcgtgaagaattggaagaaagtttaaaagccattggaagaggacacgatttaaacgttcccttgaatgaggtcattgattctttaaaggaagccggttttgaaaatcctgaggaagaatttgctaaacttttcaaattgtttactacaaatcagcaagcgaccgaagagagaactttcagaggtaagcttttcttagattcaatcaccgattaaatattctatatacacatatcaaagaaagcagtcagcagcttttttattcatacaaacatttttattaccaaataggttatagcgtggttctctcgtccagttatttgcattacaaaataaatcgttctttatagttataataatatacaaacaaagcaaatacacataaaggaaaatgcaggtgtaa

SEQ ID NO: 2978 - DNA, 2692 bp, Saccharomyces cerevisiae
cgtttgttacaaaggaggaaagttctagcaagaataaaagaaaaacacgtttgaaaaaagaaaaaaagatacttgttgtgatctttccacgttcagcaagacacacaattaactgaagccagtgtttatctgtctgtcgcctgcctccccttcctcttttctagccatggacttcgagactaatgaagacatcaacggggtccgtttcacctggaacgtgtttccctctactagaagcgacgctaacagcaacgtcgtccctgtgggctgtttgtacacacctttgaaggagtatgacgaattgaacgttgccccatacaatccagttgtgtgttccggtccacactgtaagtcgattctaaatccttactgtgtgattgatccgcgcaattcgtcctggagttgtcccatctgtaactccaggaaccatttacctccacagtacaccaacttgtcacaggagaatatgccgctagagttacagtccaccaccattgagtacatcaccaataagcccgttaccgttcctcccattttcttctttgttgtggatttgacttcggaaaccgagaacctcgattcgctaaaggagtctatcatcacttctttgtctctattacctcccaacgcgctgattgggttgatcacttacggaaacgttgttcaattgcacgatctgtccagcgaaactattgacaggtgcaacgtgttcagaggagacagggagtaccagctcgaagcgttgacggaaatgttgaccggccaaaagcctaccggccccggcggtgctgcatctcatctaccgaacgccatgaacaaagttacgcccttctctttgaataggttcttcctgcccttggaacaggtcgagttcaaactgaatcaattactggaaaatctgtctccagaccaatggtctgttccagcgggtcataggccattaagggccacaggttccgctttgaacattgcatctttgcttttacagggctgctataagaacatcccagcaagaatcattcttttcgcctccggtccaggcaccgtggccccaggtttgattgttaactcagagttaaaagatcccttaagatcccaccacgacatcgattctgatcacgcgcaacattacaagaaggcctgtaagttttacaaccagattgcacaaagagttgccgccaatggacacactgttgatatttttgccggttgttacgatcaaatcggtatgtctgaaatgaaacagttgaccgactctactggaggtgtgttgttgctaaccgatgccttctctaccgcgatttttaagcaatcatacttgagattgtttgccaaggatgaagaagggtatttgaagatggctttcaatggtaatatggcagtcaagacaagtaaagacttgaaggtacaaggtttgattgggcatgcttctgctgtaaagaagacagacgctaacaacatcagtgaatctgaaatcggtataggtgcaacgtccacctggaagatggcttccttatcgccttatcactcgtatgcgattttctttgaaattgcaaacactgcggctaattctaacccaatgatgtctgcccctggttcagcagatagacctcatctagcatatactcaattcatcactacttatcaacactcctctggtaccaaccgtatcagagtcaccacggtcgcaaaccagcttttgcccttcggtactcctgccattgcagcttctttcgatcaagaagctgctgccgttttgatggctcgtattgctgttcacaaggctgaaaccgatgatggtgcagatgttattagatggttagacagaactttgattaagctatgtcaaaagtacgccgactataataaagatgatcctcaatctttcaggttggctccaaatttctcactgtatcctcaatttacctattatttaagaagatcccaattcttaagtgtctttaacaattctccggatgaaactgcattttatagacatattttcacaagagaggatacgactaattctttaatcatgattcaaccaactctaacttctttctcaatggaggacgatccacaaccggtattattagactctatctccgtcaaacccaataccattctattattagatacatttttcttcatcttaatataccacggtgagcaaatcgctcaatggagaaaagccggttaccaagacgatccacagtacgcagatttcaaagctcttcttgaagagccaaaattagaagccgcagaattgttagtagataggttcccgctaccaagattcattgatactgaagccggtggttctcaagccagattcttgttatctaaattgaatccttccgataactatcaagacatggcgcgcggaggatctacaattgtcttaacagatgatgtttccttacaaaatttcatgactcacttacaacaagtagccgtctctggtcaggcataggagcaacggctttcttttgttttatttgatcgttattaggctttttgtataatataaggcctgttcagtccattgcgcgtgcaagaattttcctttggacctgaacgaaaagagtagaggattttatataatatattctccgtcttttttgtactgcgtggcctttactacgaatatctgtatctaatttcttttctaacttttttattaccattacta

SEQ ID NO: 2979 - DNA, 1153 bp, Saccharomyces cerevisiae
gttactaatgattctgttttctccactagaaaattgtgaacatgtcaggatctcttacgctacttaaggaaaagcatatacgttatattgaatcattggatacaaagaagcataattttgaatactggcttaccgagcatcttcgtttgaatgggatatattggggacttactgccttgtgtgtgcttgattctccagagacatttgtgaaagaagaggttatatcatttgttctgagctgttgggacgacaaatacggcgctttcgcaccatttccaagacatgatgcacatttattaactacattgtccgccgtacagatcttggccacttatgatgctttggatgttcttggaaaagatcgtaaggttcgcttgatttccttcatccgtgggaatcaattggaagatggttcgttccagggtgacaggtttggggaggtagatacaaggtttgtttatacagccttgagtgcactatcaattttgggtgaattaacgtctgaagttgttgaccctgctgtagactttgtactcaagtgttataattttgatggtggctttggattatgtcctaatgctgaatcccatgcagctcaagcttttacctgtcttggcgctttggcaattgctaacaaattggatatgcttagtgacgaccaactagaagaaattgggtggtggctttgcgaacgacaattaccagaaggtggactaaacggtaggccaagtaaactgcccgatgtttgctatagttggtgggttttatcttcattagctattattggtagactagattggataaattatgagaagctaactgagtttatactcaaatgtcaagatgagaagaagggtggaataagcgacaggcctgaaaatgaagtggatgtcttccatacagtttttggtgttgctggtttaagtttaatgggatacgacaatttagtccccatagatcccatatattgtatgccgaaatccgttacatcaaaattcaaaaagtatccatacaaatagatggcagagtaccaacactaccgtgcttgtttaagtgttcttattttgatgcattatttagatatatatctcttcttgtatagttttctttgaggatggaacgtactccatatacctagcacgtctattatgaa

SEQ ID NO: 2980 - DNA, 1409 bp, Saccharomyces cerevisiae
agacaaaaataaagcagcatagagtgcctatagtagatggggtacaaatgagcacgggagattttttaactaagggaatagaactggttcaaaaggccattgacctggacacagccacgcagtatgaggaggcgtatacagcatactataacggattagattatttgatgttggctttgaaatacgagaaaaaccctaagtcgaaggatttgataagagcgaagtttacagagtatctaaaccgtgcagagcagttgaaaaagcacttggaaagtgaagaggcaaacgcggcaaagaaatctcctagcgctggtagtggttccaacggtggtaataagaaaatctctcaggaagagggtgaggataatggtggagaagacaacaaaaagctaagaggtgccttatcgagtgctattttgtctgagaagcccaatgttaagtgggaagacgtggctggactggaaggagccaaagaggcccttaaagaagccgttattttacctgtcaagttcccacatttgttcaaaggtaaccgtaagcccacttcgggaatcttattgtacggaccaccaggtacaggtaaatcatatttggcaaaagcagtggccaccgaggccaattctacctttttcagtgttagttccagtgatttggtttctaagtggatgggtgaatctgaaaaacttgtcaaacagttatttgcgatggcaagagaaaataaaccttctattatttttatagatgaagtggatgcgctaacaggtaccagaggagaaggagagagcgaagcaagtagaagaattaaaacagaattattggtacaaatgaatggtgttgggaatgactcccaaggtgttttggtccttggcgcaacaaatatcccatggcaactggacagtgccatcaggagaagatttgaaagaagaatatatataccattaccagatttggcggcaagaaccaccatgttcgagattaacgtcggcgacactccatgcgtattgaccaaggaagattatagaactttaggtgcaatgactgaaggttattccgggagtgatattgctgtagtggtgaaagatgcgctaatgcaaccgataagaaaaattcaaagcgcgacacatttcaaagatgtctctacggaggacgacgaaacaagaaaactaacaccatgctctccaggtgatgatggcgccatcgagatgagttggacggatattgaagctgatgaattaaaagaaccagatctcaccataaaggatttcttaaaggctatcaaatcgacgagacctaccgtgaatgaggatgacttgctgaagcaagaacagttcactagagattttggtcaagaaggtaactagtcaattgattaacgtgctaatgtagatttcttgtgtacatgaaaataa

SEQ ID NO: 2981 - DNA, 873 bp, Saccharomyces cerevisiae
agatcaaaactaaggccagcaaaggtatcaacccatagcaactcataaaatgaagacctatcatttgaataatgatataattgtcacacaagaacagttggatcattggaatgaacaactaatcaagctggaaacgccacaggagattattgcatggtctatcgtaacgtttcctcaccttttccaaaccactgcatttggtttgactggcttggttactatcgatatgttgtcaaagctatctgaaaaatactacatgccagaactattatttatagacactttgcaccatttcccacaaactttaacactaaaaaacgagattgagaaaaaatactaccagcctaaaaatcaaaccattcacgtatataagccggatggatgtgaatcggaggcagattttgcctcgaaatacggggatttcttatgggagaaagatgatgacaagtacgattatctggccaaagtggaacctgcacatcgtgcctacaaagagctacatataagtgctgtgtttactggtagaagaaaatcacaaggttctgcccgctcccaactgtcgattattgaaatagacgaacttaatggaatcttaaaaataaatccattgatcaattggacgttcgagcaggttaaacagtatatagatgcaaacaatgtaccatacaacgaacttttggaccttggatatagatccattggtgattaccattccacacaacccgtcaaggaaggtgaagatgagagagcaggaagatggaagggcaaggccaagaccgagtgtggaattcatgaagccagccgattcgcgcaatttttaaagcaagatgcctagatagatagagtacgatatataaccatatgtatgtgact

SEQ ID NO: 2982 - DNA, 450 bp, Saccharomyces cerevisiae
gaaagaaaaggtaaactgacaaatatatacattaaccgatgggtaatttcagatttcctataaaaaccaagctaccaccagggtttatcaatgctcgcatacttagggataacttcaaaagacaacaatttaaagagaatgaaatccttgttaaatctttgaaattcatcgctagaaatatgaaccttccaacaaaactgaggttggaggctcagttaaaactaaatgcattgccaaactacatgagatctacgcagatcaaaaataggtgcgtggactctggacatgcaagatttgttctaagtgattttaggttgtgtaggtatcaatttagagaaaacgctctgaagggtaatttgccaggtgttaagaagggtatttggtaaaaaattttatcgcgaaagtatatatatatatatatataggatacgcacttgtaaataaatacat

SEQ ID NO: 2983 - DNA, 1536 bp, Saccharomyces cerevisiae
tagaccaataagcgggattatcataaaactcgagtttatattagctttcatctgtctttaggaaaataataccataataaaaaggacacatcatggctccaccaaagaaaaccgtaaagaagatggaccttacgtcatttttaaatgatgacacctttggttcatcttgggctgaagaagatgtcgatttgaataagatcacaattcctattgaaaccgctaatgcaaacactattccattgtccgaattggctcatgctaaaaacaacagcaataacacgcgttcaggcggctttggtggcagttttggaggtagatctagattagaccctgctttggggggcggttcttccgatagaagagaggaataccctgttccagatgctccaccatatagggctgtcataaacaacattccatgggatattaccccagagggtgttcaagcctgggttgaagatggtttagttaagcctgaagcggttgaagaagttgttttgccaaagaatctaagagacccaacaagattaaagggtaatgctttcgttactttgaaagaaagagcagatttggtcgccgttctgaagttcaacggtactaaattgaatgagagaactgtttacgtttctgttgcggctccaagaagagggggaggtgcagatgttgattggagtagtgctagaggctccaatttccaaggtgatggaagagaagatgcaccagatcttgattggggtgccgctagaggttctaacttcagaggtccaagaagagaaagagaagaagttgatattgactggactgctgcaagaggttccaatttccaaggctcttccagaccaccaagaagagaaagagaagaagttgatatcgactggagcgctgcaagaggctccaatttccaaggctcttccagaccaccaagaagagaaagagaagagccagatattgactggagtgcagctagaggctctaactttcaaagctcctcgaggccaccaagaagagaaagagaagagccagatattgactggagtgcagccagaggttccaacttccaaagctcctcaagaccaccaagaagagaaagagaaaaggaagaaccagctttggattggggtgctgccagaggtgctcagtttggtaagcctcaacaaaccaaaaatacctacaaggataggtctctaactaacaaaaagactactgatgagcaaccaaaaatccagaagtctgtttatgatgttttacgtactgaagatgatgatgaagatgaagaggctgaaaagcaaaatggagacgcaaaagaaaacaaagttgatgcggcagttgaaaagctacaggataaaactgctcaattgactgttgaagatggtgacaattgggaagttgttggtaagaaatagagtgttgtatgatgataaaatgtacatttgtatttactgtttgctttttttctttcttgtttttctactctcctttctaccaggtattctaactctattatataattaaaaaaaaaataaccatatattttgt

SEQ ID NO: 2984 - DNA, 2104 bp, Saccharomyces cerevisiae
gcaaaagaaattgtatagtattagcagtacattcgtggtcaagcagaataacagtaaaataatatgagtgataatggttcccccgcggttcttccaaaaaccgaatttaataaatacaaaatcggcaaagtgaagagtacaccagccatccagcgagatgcgaagactaacttaacatacatcaaactaagaaaaagaagtagtgagaaagtttacgggtgtacagttttccagaatcattatcgtgaggatgaaaaattaggacaaggaacatttggtgaggtttataagggaattcatttagagactcaaagacaagtggcaatgaaaaaaattatagttagcgttgaaaaagatctgtttcctataactgcacaacgagaaattactattttaaagcgtttaaaccacaaaaatattattaaactaatcgaaatggtgtatgaccattcaccggatattacaaatgcggcatccagcaacctacataagtcattctacatgatcctgccgtatatggtagcagatctgtcgggcgttttgcataatccgagaatcaacttagagatgtgcgatataaagaatatgatgctacaaatattagaaggcctaaattatattcattgtgcaaaattcatgcatagggatataaagacagcaaatattttgattgaccacaacggtgttttaaagcttgctgattttggtttagcaagattatattatggctgtcctccaaacttaaagtatcctggtggtgcaggttccggcgccaaatatacatcagtagtcgtaacgagatggtatagagcacctgagttggtgcttggtgataaacagtatacaacagctgttgatatatggggtgtcggatgcgttttcgcagaattttttgagaaaaaacctattttacagggaaaaacggatattgatcagggacatgttattttcaaactacttggtacaccgacagaagaagattgggccgtggctagatatttgccaggtgctgaactaacaacaactaattacaagccaacgttgagggaaagatttggtaaatatctaagtgaaacaggtctagattttttaggacagttgttagcgttagatccttacaagaggttgaccgctatgtctgctaaacaccatccttggtttaaagaggaccctttaccatcagagaagataacattaccgacggaagaaagtcatgaagctgatattaagaggtacaaggaagaaatgcaccaatcattgtcccaaagagtacctactgcgccaagaggtcatatagttgaaaagggtgaatcacctgtcgtgaaaaatcttggggcgatcccaagaggccccaagaaagatgacgcaagttttttgcctccatcaaagaacgtattggctaagccgcctccttcgaaaataagagaactacatcaaaatcctagaccgtatcatgtgaacagcggatatgctaaaactgcgattccaccgccagcagcccctgcaggagttaatagatacggacccaacaatagttccagaaataatcgcttcagcggcaacagcactgcacccaacaacagcaggaatcccgtaaatcgatttcatcctgagacaaatgtcagctctaaatataataaagtacctttgccattggggcctcagtcaagataccagggtaattcaaatgagtcccggtacaaaaactcgccaaatgactctagatatcataaccctaggtacgtgaacaagccggaaaccaacttcaataggcaaccacagaaatatagtcgccaagaatccaatgcgccaatcaataaaaattataatccttcaaacggttctcgcaatatggctggtgatcatcatcaaggctcgagaccttctcatccacaattcccaatctcgccctcacaggggcagcatcagcttacgagtaaaccaatagagaaaaaaaatggaagctttaaggatgaaagagcgaaaccagatgagtctaaggagttccaaaatagtgatattgcagatctatattaggttatactattctctcttcctttctggcctcgtggctaattacggaaagttgtatactgactactat

SEQ ID NO: 2985 - DNA, 2379 bp, Saccharomyces cerevisiae
atttgtctttgtaatctacttaacttagcaattgtcagctgtcctgttacaacctgttctccaaagtgaatacaataagcagtatttgctctttttcgtctaggtgcgttgatctaatcttctttttatttttcttcttcgttcagccttttttgtcctcaccggtagcgttcaccctaattctttaattgtcatacccataattatactacaaatttcgtggtctagttttctaatataactaattactttctcccttcttacttcattattttaattttgcattagtactcctctagccaaagataaacagaaatgaacagacaggaatccataaattcgtttaattcagacgaaacatcttcgttgtctgatgtagaaagtcagcagccgcaacaatatatcccttcagagagtggatctaaatccaacatggctcctaatcaactgaagttgacccggacggaaaccgtgaagtcattgcaggacatgggtgtgagctccaaagcccccgttcctgatgttaatgctcctcaatctagcaagaataagatttttcctgaagaatatactttagaaacccctacaggtttagttcctgtcgccactctacattccataggtagaacttctactgcgatttcccgtacgagaactagacagatcgatggcgcttcttcgccttcttctaatgaagatgctttagaaagtgataataacgaaaagggtaaagaaggcgactctagtggtgcgaatgacgaagctccagatctagatccggaaattgaattcgttacctttgtgactggcgatccagaaaacccccataactggcctgcatggatccgttggagttacactgtcctactgtcaatcttagttatttgtgtcgcctacgggtctgcttgtatcagtggtgggttgggaaccgttgaaaagaaataccatgtaggtatggaagccgctattttatcggtttctttaatggttattgggttctcgctgggtcctttgatttggtctcctgttagtgatctttacggtagaagagttgcttactttgtttctatgggtctttatgtcatcttcaatatcccttgcgccttagctccaaatctaggtagtcttttagcttgtagatttttatgtggtgtttggtcatcatctggtttgtgtttagttggtgggtctattgccgatatgttcccaagtgaaacaagaggtaaggctattgctttcttcgcttttgctccttacgttggtcccgttgttggtccactagttaacggttttatttccgtttctaccggacgtatggacctgattttctgggtcaatatggcctttgcaggtgttatgtggatcatatcttctgccatcccagaaacgtacgctccagttatcttgaagagaaaggctgctagattaagaaaggaaactggtaatcccaagattatgactgagcaggaagcgcaaggtgtcagtatgggtgaaatgatgagggcttgtctgttgagacctttgtacttctctgtcactgaacctgttctagttgctacttgtttctacgtgtgtttgatttactctctactatatgcgttcttctttgccttccctgtcattttcggtgaactatatggctacaaagacaaccttgtgggtttgatgtttattcctattgttatcggtgctctttgggcgttagccacaactttctactgtgaaaacaagtatttacaaattgtcaaacagcgtaaacctactcctgaagatcgtttgctaggtgctaagatcggtgctccatttgctgcaattgctttatggatcctgggtgctaccgcttataaacatattatttgggttggtccagcttcagctggtttagcttttggtttcggtatggtgttgatttattattcattgaataattacattattgattgctacgtccaatacgcatccagtgctctggctacaaaggttttcttaagatccgccggtggtgctgccttccccttgtttaccattcaaatgtaccacaaattgaatctgcactggggttcttggttgttggctttcatctccactgctatgattgctttaccttttgcattttcttactggggcaaaggtttgagacataagttatccaagaaggattattccatagatagtattgaataagagtaacgattttacgaatcgagcataataatgaaaaattatagtagtagtaatgataaaaacataagcaaacataagcaaacataagcaaacatatcaaacatgcattcaaaccattatccgacagtaatgtacatatatttttacgtattttacattctttctctattgttcttttatctattgctatcctaa

SEQ ID NO: 2986 - DNA, 1453 bp, Saccharomyces cerevisiae
tacttatacatctgaacagcaaagttaggtaaaaccataaaattctggttagaaaatgtctggttatttttcagggttttctctaaacaagatcaccgattcaattgccaccgctgctcacaagacccaagacactttgaacaatgcattagcaaatgcaaatgtaaacttaaatgaccctcaaacaagactatcaatcaaatcgcgaactagatttgttcaggaatcattgggtactgtatcagatataagtaaattaccaccacagtaccaattcttggagaaaaaaagtgattccttagagaaggtatgtaaaaggattctactggtgtccaaaacgttcgaagtagagggctacgactatccaccaaatttaacggagagtatttcggattggtggtctctcaataaagatggctggtttggctctaaaaaatccgaaagttccactaaaaaaaagggatctaaccatgacgatgcttttttgccaaggtcttttgctcaagccatctcaaaagccgctgttgactgcgaatgtgaatttcaaaatttagaacacaacgaaaaggcagaactaaagaagaaaaaggagtctatcaaaactgcacagacaacggaagctcagggtgccgaccataatgaagaagacgaggaagatgaagaagatgaagaagatgatgaagatttgtctaatttgatcaaagttttcgattcgtggtcgacatgctataaaaatatcgatgaagggaaggcagagatggattctatgatggtcaaggaattcaacaaaaaattagaaacattaataaaccaagacttcaagaaggtccatgacctgcgcaaaaaagtggaagaatcaagactcaaatttgatacaatgcgttatgaagtcaaagcaaaagaagcagagttagaggcgaaaaaagctgaagccacaggagaagcacatagcaaggatgttagcgcaaaggacattagcgcaaacactaccacctcttttgacgaaacgccttctaccgaggatgaaaagccaaaatcagagggtgccgaagaggaatcaaagaaagaagcgaatgagcctactgttgatgacgttgctgatagaaaagaagatttaaagagtaacaaagtaaatgatgagccaccgattgaagaatctgaggataataaattactggaaaaactggaggatgaatttgtctccaatactacagcagcagtggaaacaatggaagaaatcactgacagttctgaaattctgggcttgataaaactgttccagaatttccagttggtttactttagacaatgtgtccaagaagtggaggcaaaccttaaagttctaaatggtttggaaatttagcaaatcaggcaactaaaacattactcattcatgtataaagtaatttgattgttatttttaaacattatatatgatgtaagtttcttctat

SEQ ID NO: 2987 - DNA, 1153 bp, Saccharomyces cerevisiae
atagacagtccgcttgctacgccattgcccgcctgctcaattctagtgacaaatgactgtaaaagagtatactaaatcgaagttgccatgctcgatattgaatatcaaacctacagtcactaaaagtggcgaggatgcgcctcttctagtatggatccctggtaatcctgggcttttatactattatcaagaaatgctacatcatctacacttgaagcacccagattgggaaattcttggcatatcccatgccggaatgacattgaacgctcattctaatacaccgatattttctttacaagatcaagtagatcatcaggtagaggtaattaacaatttctcatgcaagaacaggaaaattattattatgggacattcggttggggcatacatcgtacaaaaagtatgcctttctaacaaactggttggctccgtacaaaaagttggtctcgttacaccaactgtgatggacattcacacctctgagatgggtatcaaaatgacagcggcacttcgttatattccaccattggctcatgtggtatcattgttcagttatattttcttttattggatcttatcagaagggttttcaagatttattattgataaatttatgggctgtggaagtactggttatcaggcagtactatctacaagaatttttttgactcataggcagtttgttcgtcaatctctaggattagctgcccaggagatggaagaaataactacgaactgggagtttcaagatagatttatcaattattgcgaagagaacggaatttctatttggtttctcttcagtagcaacgaccattgggtttctggtaagaccagatcacatttgtcggattattataaggataaagtcaagcaggaacgcttaaaaattgatgtcactgacaaaatacctcattcatttgtagtaaaacatgcagaatatgctatcaatgcatttttttagtgtgatggcaagtttgaatgcaatggcttcgatgagggtaatagtgtttttataccaactctcaattctgggtgactgctcaacaattgacagtttacgagaccttatgatctcacaaattgttctcgcatataattgcattagtgtgcatgtaaatatgtatatatctacaaacggaagtgaggc

SEQ ID NO: 2988 - DNA, 1796 bp, Saccharomyces cerevisiae
tgaagagagatctattaaaaagaaacgtcaaagaatatggtattgcttatatcagaaattaaagatattgccaagaggctgactgctgcgggtgacagaaagcagtacaactccattatcaagttaatcaatgaactagtgattccagaaaatgttactcaattggaagaagatgagacagaaaaaaatttgagatttctggttatgtcgctattccagatatttagaaagctgttttcccgcggcgacttgacccttccttcgtccaaaaagagcacattagagaaggaacagtttgttaattggtgtagaaaggtgtatgaagcgttcaagacgaagctgttagctatcatttcggacatacctttcgaaacatcacttgggttagattcgcttgatgtctatcttcaacttgcagagctggaatcaactcattttgcatctgaaaagggcgcaccatttttccccaataaaacattcagaaagttaatcatcgccctatggtcctcgaacatgggtgaaatagaggatgtcaaaagctcgggtgcgtctgaaaatttaatcatagtagaattcacggaaaaatattatacgaaatttgcagatattcaatactactttcaatcagaatttaaccaactattagaggatccagcctaccaggacttgcttttgaaaaacgttggtaaatggttagctttagtaaatcatgacaaacattgctctagtgttgatgcagatttagagatctttgtaccaaatcccccacaagccatagagaacgagtccaaattcaagtccaatttcgagaaaaattggttatcccttttaaacggccaattgtctttacagcagtataagtctattctgttaattttgcataagagaataatacctcatttccacactccaactaaactaatggatttccttactgattcctacaatttgcaaagctctaataaaaacgccggtgttgttccgatcttggctctgaatggcctttttgaattgatgaaaagattcaacttggaatatccaaatttttatatgaaactttatcaaattataaatccagacttaatgcatgttaaatacagagcaagatttttcaggttaatggacgtatttttgtcatcaacacatttatccgcccatttagtagcatctttcatcaaaaagctagccagactcaccctagaatcaccaccctctgctattgtcaccgtgattcccttcatctataatttaatcaggaaacatccgaattgtatgattatgctgcacaacccagccttcatttccaacccattccagacacctgaccaagtggcgaacttgaaaactctgaaagaaaactatgtagatcccttcgatgttcatgaatcggaccctgagttaactcatgcactggattcctctctgtgggagctggcgtcattgatggaacattatcatcctaatgtagccacgttggcgaagatatttgctcaaccatttaagaagctaagttataacatggaagatttcttagactggaactatgattctttgctcaatgcagaatcttcaagaaagttgaagacacttcctacgttagaatttgaggctttcacaaacgtttttgataatgaagacggcgatagcgaagcgtcatcccaaggtaacgtctacttgcctggggtagcatggtgaaagcgaagatgaacaacgaagttttaaaagtgtgtatatatacatttatatcaacagagtcatcgatttcccttgtttgagatgtaaaaaaaaaaaaaaat

SEQ ID NO: 2989 - DNA, 1049 bp, Saccharomyces cerevisiae
tggcgtgaaagaagtagctcctacgaggtgacaaaatacaagaaaagtaatggaaaagtacaccaattggagagacaatggtacgggaatagctccatttctaccaaacacaatcaggaaacctagtaaggtgatgacagcgtgtttgttgggtatcctaggggtgaaaaccattataatgctaccattgattatgctgtaccttctaactggccagaacaacttactgggtttgatattgaagtttacattcagttggaaagaggaaattaccgtgcaaggaatcaagaaacgtgacgtaaggaaatccaagcattatccacagaagggcaagctttatatttgcaattgtacctcacctttagatgctttttcagtggtgttattagctcaagggcctgttacgttgttggtcccatccaatgacattgtatacaaagtttccataagagaattcatcaacttcatcctcgccggtgggttagatataaaactctatggccacgaggtagcagagctatctcaattgggcaataccgtgaattttatgtttgctgagggtacctcatgtaatggtaaaagcgtcttaccgtttagtataaccgggaaaaaacttaaagaattcatagacccttcaataaccacaatgaaccccgcaatggccaaaactaaaaaatttgaattgcagaccatccaaatcaaaactaataaaactgccatcaccacattgcccatctccaatatggagtatttatctagatttctgaacaagggcattaatgttaaatgcaagatcaacgagccacaagtactctcggataatttagaggaattacgcgttgcattaaacggtggcgacaaatataaactagtctcacggaagttagatgttgaatctaagaggaattttgtgaaggaatatatcagcgatcaacgtaaaaagaggaagtagaaatacttatgaaggcatgcatgcatgcatacatatttatatatatatgtctttaggagtatgtattgcatttaatcgaaacaaacaagaaaaagaa

SEQ ID NO: 2990 - DNA, 1864 bp, Saccharomyces cerevisiae
cctttcctatcttgtagaataaggttgtgtgctttgagtctgatagccgtcttctttcggtcgcttcttctctcttttggttctttgattgtctattacaatcaatgcaggctagttaagggtccaatcacttttgaaattgttttgtaaaaagcgaaggcattttttttttagaagatacaattgaaaacatatagatttagagttcacatggctcggggtgacggacatctatggacagagacatatgatagttccacagtcgcttttatgattttaggtgccgccctggttttcttcatggtaccggggctgggctttctttattccggtttagcaagaagaaaatctgctctggctttgatttgggtagtgataatggctaccttagtaggtatactgcaatggtatttttggggctattctttagcattctctaagactgcgacgaacaacaaatttatcggcaacttggattcatttgggtttagaaacgtctatggcaaaatttcggatgattccacgtatcctgaactgatttatgccattttccaaatgatgttcatgtgtgtcgcattgagtattatagctggtgccactgcggaaagaggtaagctttttccacatatggtttttctttttgtttttgcgactttggtttactgtcccatcacttattggatttgggccccaggtggttgggcctaccaatggggggtattagactgggctggcggtgggaatattgaaatcctaagtgctgtggctggtttcgtttattcttattttctaggaagaagaaaagaaaacctcctgatcaactttagaccacataatgtttccatggtgactttgggtacttctatactttggtttggttggttgcttttcaatgctgcaagctcactgtcaccaaatatgaggtccgtatatgcgttcatgaacacttgtctcagcgccaccacgggtggaatgacgtggtgtttattagattatcgatctgaaaaaaaatggtccactgttgggttatgctccggcattatctgtggtttagttgctgccacgcctagctcgggttgtattactctatatggctctttgatccaaggtataatagcgggtgttgtttgtaattttgcaacaaaaataaagtattatttaaaagtggatgattccttagatctattagctgaacacggtatcgccggtgtggtgggattgatttttaacgctctatttgcagctgattgggttattggaatggacggcacaacaaagcataagggtggttggttgacgcataactggaaacaaatgtatattcaaattgcctatatcggtgcctctgccggctattgtgctgtggtcacggccatcatttgcttcgtattaggtaaaattccgggtgtccatctaagagtcactgaggaagccgaagcattggggttggatgaagatcaaataggcgaattcgcttacgattacgtggaggttaggagagattattaccagtggggtgtagatacagatgcacttcatactacatgcaatggcgctaattctgcgtctgagacaaatcctactgaggacagccaaaactcctcattgtcatcagctacagtaagcggccaaaacgaaaaaagtaataatcctaaattgcatcacgcaaaagaagcatgaatcaactccccagtaactgctcgtcggcacattgaacggaagtgccgcgatactagatttttttttatttatttatttctgaactttttaattttatattctgcattttatcatagactcacaaaacaaattcatttcatcatttggtatttttactcaccattctatatgccataataatatt

SEQ ID NO: 2991 - DNA, 1360 bp, Saccharomyces cerevisiae
caagggagtttattgtcctctgaagtatatatagaggaacttttagtaataaaaggcaaaaacatatcaattagcaatgagtacagccgatcaagaacaacccaaagtggtggaagcgacaccagaagatgggacagcttcctcccaaaagtcaactataaacgctgagaatgaaaatacaaaacaaaatcaaagtatggaaccccaagaaacttcaaaaggtacctccaatgatactaaagacccagataacggagaaaagaacgaggaagccgcaatagacgaaaatagtaacgtagaagctgcagaaaggaaacgtaagcacattagcacagatttctcagatgacgacctagaaaaggaggagcataatgatcagagtcttcaaccaacggtggaaaatagggctagtaaagatagagattcaagtgctactccaagtagtagacaggaattggaagaaaaactggaccgtatattgaaaaaaccaaaggttagaagaacgaggagggatgaagacgatttagaacagtacttggatgaaaaaattctaaggcttaaagacgaaatgaatattgcagcacagttggacatcgatactttaaataagagaatagaaactggagatacttcgctgattgccatgcagaaggtcaaattgttgccgaaggtggtaagcgtactgtcaaaggcaaacttggcagacaccattttggataataacttacttcaaagtgtcagaatatggttggaacccttacctgatgggtctctgccatcttttgagattcaaaagtcactctttgcagctttaaacgatctaccagtgaaaactgaacacctgaaggagagtggtttggggagagtagttatcttttatacaaagtccaagcgtgtcgaagctcaactagctaggttggctgaaaaattaattgcggagtggacaagacctattattggtgcttcagataactacagagataagagaataatgcaattagagtttgattctgaaaaattgagaaagaaatccgttatggattctgccaaaaataggaaaaagaaatctaagtctggtgaagatcctacctctcgtggttcttcggtacaaaccttgtacgaacaagctgctgcaaggagaaacagggctgccgcaccagcacaaaccactactgattacaagtatgctcctgtgagtaaccttagcgcagtacctacaaacgcaagagcagttggtgttggttccactttaaacaatagtgagatgtacaagaggttgacttcaagattaaacaagaagcataaataataacaaaacaggtaattccgtaatgctttgagatatgtatcatatgtatgt

SEQ ID NO: 2992 - DNA, 675 bp, Saccharomyces cerevisiae
gaaagatagtggaacattgagaatattcaaggaaagagacaggaggattcgagaaatgacaacaattcagccttttgaacctgtcgatttattcaaaactaacaatgtcaaccttgatatcttaacagaaaacttccctttagagttttattttgaatacatgataatatggccagacctttttttcaaaagttcagaaatgactgttgatcctacatttaagcataatatctctggttacatgatggcaaaaacagaaggcaagaccacggagtggcacactcatataactgcagtgacagtagctccaagattccgccgaatatcgctagcttcgaagttatgtaatactttggagaccatgaccgatgtcatgccccatgaagtcaactttatcgatcttttcgtcaagtgcaataaccaattggccatcaaactttacgaaaaattgggatacagtgtctacaggagagtggtgggatattataactcagctgaagatgggtatccagataccctgaaaaaagtagatgacaataaagatgcttttgatatgagaaaagctatggctagggacaggaacagaagcgtacggccggatggaagaagccataaatgctatccacatgatgtaagattttaaggtatgtattacctcgtcctcatactcagaac

SEQ ID NO: 2993 - DNA, 987 bp, Saccharomyces cerevisiae
atgttaactctagagtctgcattaactggcgctgtggcttcggcaatggccaatattgcagtttatccgctggatttatcgaagacgatcattcagtcacaagtatctccttcttcaagtgaggatagtaacgaaggtaaagttttgcccaataggagatataagaatgttgtagattgcatgataaacatattcaaagaaaagggtattttgggtctgtatcaaggtatgacagtcactacggtggccacatttgtccagaattttgtttatttcttttggtacacatttatcagaaagtcctacatgaaacataagctgttaggactgcaatcactgaaaaaccgcgatggtcctatcacaccttctacgattgaagaattggtacttggggtagcagctgccagtatatcgcaactttttactagtcccatggctgtggtagctacaagacaacaaacagtccattctgcagagtctgccaaatttaccaacgttattaaggacatttaccgtgaaaataatggggacataactgctttttggaaaggtttaagaacaggtttagcattgacgataaatccttccatcacatatgcctcttttcaaagacttaaagaagtttttttccatgaccattccaacgatgctggcagtttgtcagcagtgcaaaatttcattttgggtgtcctttccaagatgatttcgactctagttacgcaacccttgattgtcgctaaagcaatgcttcaaagcgctggctctaaattcactactttccaagaagcgctactatacttgtacaaaaatgaagggttaaaatctctttggaagggagttcttcctcaattgacaaagggtgtcattgtgcaaggtctgttgtttgctttcagaggagaattgacaaaatctttaaagaggctaatattcttgtactcttcttttttcctaaagcacaacggacaacgcaagctggcttccacttga

SEQ ID NO: 2994 - DNA, 1210 bp, Saccharomyces cerevisiae
aagaagatatgtcaaatattgtgggtattgaatataaccgtgtaacgaatacaacctccacggattttcctggtttctcgaaggatgcagaaaacgagtggaatgtggaaaaattcaaaaaggacttcgaagtcaatatttcgtcattagacgcaagagaggcaaatttcgacttgataaacattgacacatcgattgcgaatgcctttcgtcgtataatgatttccgaggttccatccgtggctgctgaatacgtctatttttttaacaatacatccgttatccaagatgaggttttggctcatagaataggcttggttccattaaaagttgaccctgatatgctcacatgggttgatagtaatttgccggacgatgaaaagtttacggatgaaaatactatcgttttgagtttgaacgtgaagtgcacaagaaatccagatgctccaaagggatctactgatccaaaggaactatataacaatgcccatgtctacgcccgtgatttgaagtttgaaccacagggcagacaatctaccacttttgctgattgtccggttgttccagctgatcctgatattttattagctaagctaaggcctggtcaagaaatttcgttgaaggcacattgcattttaggtatcggtggtgatcatgctaaattttcaccagtttccaccgcttcttatagattattacctcaaatcaatatcttacagccaatcaaaggtgaaagtgccagaagatttcaaaaatgttttcccccaggtgttattggtattgatgaaggttcagatgaagcgtatgtcaaagatgctaggaaggatacggtttccagggaggttttaagatacgaagagtttgctgataaagttaaattaggaagagtgaggaaccactttattttcaacgtagaaagcgctggtgccatgacaccagaagaaatttttttcaaatccgtcaggattttaaagaataaggctgagtatttgaaaaactgtccaattacccaatgatcctactttgcatactaataaaaaaaacacagtttgagaaaaatattaaatacttaacctcagggtctttatctttgtataatcttttcttctagtattagtagaattggcaaatcctaccaaaaaaatacaaacccatgaatcgtcatagataaggaaatgtaatagaatgatatatgtaaatgtaactctct

SEQ ID NO: 2995 - DNA, 2749 bp, Saccharomyces cerevisiae
tagagatagaacatagaaaacaaaccaaattcgttgggacagcgaagtagcgcaaactaacgatactgtattgtcaggctctaaaagggtgaagttttgatggaagggcaaaaatcgaatgcatcatgggagagctcgatcatcgagggccaattgtctaaaaatctagcaaggtacaccttgttattagacaaattatcgacactatctcaaatagacaagctgtctgaagtgatagccaatgattacgcaaaacaatctaaacaattaaatgcatttgtgcaacagtcgcaatcatcgctcaacaaagagtcccggaaattagaattgcaaagaactaaccttacgactactttgactcagtttcatgagactgtggccaccatttcttcttcgaacgcaagagcaaaagctatacatgacgatattgaaactgtagatcaggaacgcgctttggtcaacaaaacgttacaatttgtaaaagacgtcaggacgctaaagaataatatttcactggcgcattctgctttagaaacaaaggattacttagttgctgcgacagcaatcaatgaaattagaagccttccggataaaaaacttattgtatccgagtttgccaagaaagttgtgccctcgagtgaaattcccgaagaaccagctatactaataaagaattggtgtaaggaactgacaagtttatttcaggagcaattcatggaagcaacaagaacacaggatattaaagagctaaccttaatgttcaaaatgttccctatgattgggcaggacgtacttggtttagacctgtattccaaatatgtctgtgatattattgcggacgaaagcaggaaaattatgtcgaattctatggaaaacagcaccaagtttcaaggatttttttcacaagtactgttacatctttttaaaattgtatcgaccattataaatgatcattcaaaagtcatcgccacgtgttatggaaaaaagcacatggtgcatgtcatggaaaaagtagaaaaagaagctgatcttcaagctagtttgattctagatatttttatggagacgaggaaaatagaaaggactatacatgatataaatgaatgggaacattcacaaaagaatgaagatgtgaatatagacagtaatcagtcggatatcgaaacagacggagaaacggaaaagagctcaattatatccattcatgacttggcattattgataatggaattttctcaaatacttcaaaattggtccatgtattctagattttattcagttaaatggaatgaatttagcgatttgcatccgcatgtattgcaaccacctccaccaatagcagatggtaaatttgccttaaagttaaagcaagataaggtctttgatgagtttcaggtgtttgtgttgaaccatctgcagagatcatttagaaatagtatttcactagaagaattaccgtcactgaacgatcttataactgctgttcccctcaatgaccacgataacatttcataccctgtaacatctgttttagatgacttaattttattagttcggaaaaatctgatatcagtggttaatactggccagtttaagctcttagcaagttttttgaacgagttggtaaaattttttcagaaccgatttctggtaaaatttatgcaaaacaaatttaagttactacaatcgaaactagcctccaatgtatctttgaaaagatacattccaaaaggtgaggagcaatctgcaacatcaagatcggtttctccacctgcaaataagttttctccgctaagcaggttcacttttagaggggcagcagctagcgctttgacaaatattcaatcaaatttacaagccgtagttgcagaggacgaggattccattcttgcgttgcaccattatttgatatatctgaacacgttgtacttgagtaaagtatacgttcacaggctgttatccatagaaatattagaagacgattcgcaaaggattttgagagacaatttcccttttgacaatgatgcagcgcagttacagaatttaattataaactcagaaaaattagtcctggaacaaacagataagctaagcaaatgggctgtcaaatacttgttccaaaatatcctacaaaatagggttcggaacttattgggaactgtttttgttaattcagcctcatcaaattcctcaacgtccaatcaaaaaaatgtgtctcgcgattattctgcaggttcgaaccaaaagaattacatcacaagcatagaagatttcgaagatttgtcgcaaattaacagtttcaatagcaaatggaaccaattgattatcccttacaaaaatattcttcacaacgaagcatatgcagagttgctatctgtcatagtcgactacatcgtaacaacattggagcaaagaatatggactctagaattcaatgaacttggtgttacgaaattagatagagaactgagccttttcatcggcaatatgtgtggcttgaactataatctcagagagaagttcttgaaattgacacaaatcgtgttgcttctcggtttagatgatgacaattttgatttgactacaggtgatatcaaggatgacttcaatggtactttcgattgggtgataaactctcaggaaagaattaaagctagaaatatgaagattgatagaacacagtaaatataacataagctttacgagctgaatactaagtagtttcatataaacgcaaacataatcttgg

SEQ ID NO: 2996 - DNA, 616 bp, Saccharomyces cerevisiae
ccaagaacatacaaacatagccaaagatgtctgccaaagctcaaaaccctatgcgtgatttgaagatcgaaaagttggtcttaaacatttctgttggtgaatctggtgacagattgaccagagcctccaaggttttagagcaattatctggtcaaactccagttcaatccaaggccagatacactgtcagaactttcggtatcagaagaaacgaaaaaattgctgttcacgttaccgtcagaggtccaaaggctgaagaaattttggaaagaggtttgaaggtcaaggaataccaattgagagacagaaacttctctgctaccggtaacttcggtttcggtattgacgaacacattgacttgggtatcaagtatgacccatccatcggtattttcggtatggatttctatgtcgtcatgaacagaccaggtgctagagtcactagaagaaagagatgtaagggtaccgttggtaactcccacaagacaactaaggaagacaccgtctcttggttcaagcaaaagtacgatgctgatgttttggacaaataatttaattagtttgtgaagaaatataatacatttatatactcatatctatgttttttttgtaacca

SEQ ID NO: 2997 - DNA, 528 bp, Saccharomyces cerevisiae
cagtaaacttaacaacgaaaaatgtgtttagtcaaaactacggctcatttgcttttttattcctttgtatttggaggaacgacgttttattcctatgtagcttctccaatcgcattcaaagttcttgaaaaagaccaattttctgctttgcaaaataagatcttcccgtattttttccaaatgcaagcggcatcacctgtcatcctggcccttaccgctccaattgccttgacaacaggaccattatcttctttggtggttgcatctgtcagtgggctaaccaatttgttttggttgttgccctggacccataaagttaaagaacaaagaaagaatattgcgaagaaatacacgggtagtgaattggaagcaaaggatgctatattacgtaaagaatttggcaagtcgcacggattgagtcttttgttcaatctttctaatgtttgcgggatgcttgcgtacggtgtttgtttgtcaggtggtttgttaagaaaaattccaaaataattattttacaagtaaatatat

SEQ ID NO: 2998 - DNA, 2373 bp, Saccharomyces cerevisiae
atggctagcttgaaggtatttctcgcagtttacttgcttggcggtatcacatttttgcctttggtccttttcaccctctataaaatccatttattgtacagtaaccttaaatcggcatcgaagaaggagctagatcatgatacagcagacgaaattgatgagaaaaccagacttctggctcgcgatatagacccagagtttaaagcacgcaagctagaagagcaattaggtgtcaaagtttttaacaagggttggatcaccgtcactaagcaatattattatcattcttcagaagtggctgtaattttgaagaattctaataataataaagattcagacactgcacttcaagagcaaatcttgcaaagaacagacttgaagaaaaaacaaaggttttttgcagtattaagacatggaaatttgtttttgtataaagacgattctcaaaatgcaaatttggtccatgctatatctttacaaaacagatttatcaccatttggccccgtttcgatgaactgggtaaggaagaattgccagatgcctcgcttttcactaagagaacttgtattgctattttcaagaatgacctcgtttctatagactctaaaaaccataatgttatcctgccacacttcgacccacttaccagtgctgaatcgaataacggtgacatctctaccaatgacactacacatgaatatcaatcacaattccatagctcaaatcagttcttcttgtatttcgataataacatggacaaagaagattggtattatcagttgatcaatgcctctaaaaacagtaattccctctcaactggtttattggatcctaatgtttcagctaacgcagctcatttgaagactaaggatatgttacaattgattcaggatatcaactctactgaaaatcagttaactactaagtggctgaatgctcttcttgggagattatttctttctctgcaacaaactgatacgttgaataagtttattcatgagaaaatctgcaagaaattgaataaaataaaaaccccagggttcttggatgatttggttgttgaaaaggtcgacgtgggtgatagtgctccattattcacctctcctgagttattagaattgtctcctgagggttcgactaagattgctatcgacgttcaatacaggggaaacttgacaattattattgcgacaaaggcgagtattaacttgggatcacgtttcaaacaaagggaggtttctttgcagttgtccataaaaattaaagaattttccggtccacttttatttttaatcaaaccacctccatctaacagaatttggtatgcttttcgcaccgaacctataatggattttgaaattgagcccattgtcagttcaagtaaattatcatacaacgtcgttactaacgctataaagagtaagtttgccgaagccgtgaaggagtccctagttgtaccgtttatggatgatattgttttttatccaacacctaatgaagtatacagaggtggtatttgggaggagcaggatcctgaggcagcggcgagggctcgcactgctgcggcagcctcagatatgaataatactagtgctaaggaacacttagaagcacttcaagagggcggaatgaaaacccagagtcgaatcaaaaaagccttaaggccagagagaaagaaagaaaacctaaaagatcttgttgacgcatctggagtggcaacgaaaactacaacccagacaacagtcacaaccgcgactaatgatgatgtttccagttctgaaaattctaccaagtcaaggaaatacttcaagaattcaatcaagaaaatcggtagatggtataaggataatgttggtaattcgagtgacaccgaagatatggatgaaatagatgttcaagataagaaaaatgacgattcagcagatgagagagaatcagataatcctatccttacatccaatccaaaaatgatttctaataggagaccagtaccaagaaggccttcacaaccgttaaatacactatctccaaaactagaaggcaggaaggaaaaagacactgagaattttccagttccaccgtcggcttcaaatatgaatgcttcaaagatgtttgcgaacaaagaaaatagaaagttttctgtatcctcaaatgattctcagaattcgctcaaaaatggtgatccccatgtgaaagcttcaaaacttgaaagctctcaagcttttgttaagaagacctctcagaatcgttttaatgacggctttttcaagcaagatttagaatttgaagaacagcgagagcccaaactgtgagtccacggtactatattaaaaataaataaatatcacttgaagctatatgcaaaatgttgt

SEQ ID NO: 2999 - DNA, 1711 bp, Saccharomyces cerevisiae
gaaagaaaacacagcatcgagtctaactaaaggatggttttggctgatttggggaagcggattaattctgctgtgaataacgcgatttccaatacacaggatgactttactacatccgtagatgtaatgttaaagggcatcgtgactgcgttgttagaatcggatgtgaatattgccctggtttctaagttacgaaataatataaggtcacagctgctgagtgagaaccgtagtgagaagtccacaacaaacgcacaaactaagaagcttattcagaaaacggtgtttgatgaactgtgtaagttggtcacctgcgaaggtagtgaagagaaggcctttgtgcccaagaagagaaagacaaacatcatcatgtttgttgggctgcaaggttcaggtaaaactacttcctgtaccaagttagcagtttactactcgaagagaggtttcaaagtgggtttggtatgtgcggatactttccgtgctggtgcatttgaccaattgaaacaaaacgctataagagcaagaattccattttatgggtcatatacggagactgaccctgccaaagttgcagaagaaggtattaacaagtttaagaaagagaagtttgatatcatcatcgttgatacttcaggtaggcatcatcaagaagaagagttgttccaagaaatgattgaaatatccaatgtcatcaagcctaatcaaactatcatggttttagatgcttccattggtcaagctgcagagcaacaatccaaggctttcaaagaatcgtccgattttggtgccattatattaaccaagatggacggccacgctagagggggtggggcaatttcggccgttgcagccacaaacactccgattatctttattggtacaggtgagcacattcatgatttggaaaagttctcgcctaagtcattcatatctaaactgttgggtattggtgatatagagagtctctttgagcaattacaaaccgtttccaacaaggaagatgcaaaagccacaatggaaaacatccaaaagggtaagttcaccttgctagatttcaagaaacagatgcaaacaataatgaaaatgggtccattatcaaatatagcgcagatgattcctggtatgagtaatatgatgaatcaagtaggggaggaggaaacctctcaaaagatgaagaaaatggtttacgttttggattctatgactaaagaagaactagaatctgatggtagaatgttcattgaagagcctacaagaatggttcgtgtagctaaaggttcaggtacttctgtgttcgaggtagaaatgatattgatgcaacagcagatgatggcaagaatggcacaaaccgcaacccagcaacaaccaggagcccctggtgccaatgctaggatgcctggcatgccaaacatgccgggtatgccaaacatgcctggtatgccgaatatgcctggtatgccaaaagtgactccacaaatgatgcagcaggcacaacaaaagctgaagcaaaatccaggtctaatgcaaaatatgatgaacatgtttggtggcggaatgggcggaggaatgggcggaggaatgcctgatatgaacgaaatgatgaaaatgatgcaagatccacaaatgcaacaaatggcaaaacaattcggtatgggctaaaggccaccatttgaatatacacagtatatatatatatgtatgtatgcatatt

SEQ ID NO: 3000 - DNA, 527 bp, Saccharomyces cerevisiae
gtaagaagtcaagttttgatggctagtgttttgttgcctcaattgcgtacgggatggcatgtggatcaggctattgttaccgagactaaacgacttgttgtcattcgttttggtcgcaaaaatgatagacaatgtatgatcatggacgagttgttatcttcgattgctgaaagagtaaggaactttgcagttatttatttatgtgatatagatgaagtttcagattttgatgagatgtacgagctgacggatcccatgacagtaatgtttttctaccacaataagcacatgatgtgtgattttggtacagggaacaacaacaagttgaactttattgtagacgacaaacaagaaatgattgacatattagaaactatattcagaggtgccaggaagaacaaagggctggtggtctctccatacgattataatcataagcgtgtttcataattcataataactatgtaggctaggcgcacgatgtcttaacaattcagtgagtaagtaatgaataaccttgacagaat

SEQ ID NO: 3001 - DNA, 1212 bp, Saccharomyces cerevisiae
atgtcgagctcctccaaggcttctgcaagttcatccttgtcaagcacagccacctcttcaacttctgcaactagaggcagcgacggatgtgttgtttgcgattcaactgcatcatgccctgtttgcgcttcaggagaatattgtgttatgacttcattaacatgtgacaagtgcccatccacatactgtgcgaaacagtccgattcacaactgagtagtttatcttcctcctcctctagttctagttccagtaattcaaatgagaaaacctcgttgattgtggggttcaccgtgggtattgtaggtggtgcgatgcttattgccttggtggcgttgtatttcatcaacaagagatattggaagcccaaaaggcaaaaaaataaagctttgaaattggaagaggcatcgcaaagttacgggaatgaagaggaatacttcgacgatgaagacgatgatgatgaagacgatgaggatgatggcggtatgagaaaagatgaaagtcacaccctgttcaatacgtcactggtacctccaactctcaacgtgccgggaaacagaagttcagcatctaccactcgtacaagggcttctaatattttgcctattgcctacattcctggtgtgacaagcggtttgagtaccgacaaactgcaatcaaaactacgctcgagctctaagagacaaaatgcagctggtgatatcaggtcacatataaccttaggttcttccatcttggatggtctggatgacgaagatgacgagcataaccaggtactcaataaggacgcagacgataacctcataactgctattcgtgctaaacctaaactggttcaaatcgcagaggaagagagtgataaggagattcaggacttggatgtcattgaagaacagacagaggcggatgatctttcacacatggcaaaaagcgaggcaagccatggtaataacgacgaagatgacgatgaagaaggaagttttatactggacttggaaattccagaatcgatacgcgagagcacccagggcagtcgcactgagagcccgtttgaggacaagttcgaaatacacgatgaacgataaataaaaggcgtgtcagtattctgcaatcccggggaaaatattatatcatatcaatattcaatgatctacgtctatatagttacgtgtatacgccgtaataagcgctttttttttttttttaattttctg

SEQ ID NO: 3002 - DNA, 2246 bp, Saccharomyces cerevisiae
ttttaaatttcgttttttaagtttcagatcaaactgaagtacaacagagaaggaagctcatcccaagcaactctacatagttacctctttagcaaacaaaatgactcaattcactgacattgataagctagccgtctccaccataagaattttggctgtggacaccgtatccaaggccaactcaggtcacccaggtgctccattgggtatggcaccagctgcacacgttctatggagtcaaatgcgcatgaacccaaccaacccagactggatcaacagagatagatttgtcttgtctaacggtcacgcggtcgctttgttgtattctatgctacatttgactggttacgatctgtctattgaagacttgaaacagttcagacagttgggttccagaacaccaggtcatcctgaatttgagttgccaggtgttgaagttactaccggtccattaggtcaaggtatctccaacgctgttggtatggccatggctcaagctaacctggctgccacttacaacaagccgggctttaccttgtctgacaactacacctatgttttcttgggtgacggttgtttgcaagaaggtatttcttcagaagcttcctccttggctggtcatttgaaattgggtaacttgattgccatctacgatgacaacaagatcactatcgatggtgctaccagtatctcattcgatgaagatgttgctaagagatacgaagcctacggttgggaagttttgtacgtagaaaatggtaacgaagatctagccggtattgccaaggctattgctcaagctaagttatccaaggacaaaccaactttgatcaaaatgaccacaaccattggttacggttccttgcatgccggctctcactctgtgcacggtgccccattgaaagcagatgatgttaaacaactaaagagcaaattcggtttcaacccagacaagtcctttgttgttccacaagaagtttacgaccactaccaaaagacaattttaaagccaggtgtcgaagccaacaacaagtggaacaagttgttcagcgaataccaaaagaaattcccagaattaggtgctgaattggctagaagattgagcggccaactacccgcaaattgggaatctaagttgccaacttacaccgccaaggactctgccgtggccactagaaaattatcagaaactgttcttgaggatgtttacaatcaattgccagagttgattggtggttctgccgatttaacaccttctaacttgaccagatggaaggaagcccttgacttccaacctccttcttccggttcaggtaactactctggtagatacattaggtacggtattagagaacacgctatgggtgccataatgaacggtatttcagctttcggtgccaactacaaaccatacggtggtactttcttgaacttcgtttcttatgctgctggtgccgttagattgtccgctttgtctggccacccagttatttgggttgctacacatgactctatcggtgtcggtgaagatggtccaacacatcaacctattgaaactttagcacacttcagatccctaccaaacattcaagtttggagaccagctgatggtaacgaagtttctgccgcctacaagaactctttagaatccaagcatactccaagtatcattgctttgtccagacaaaacttgccacaattggaaggtagctctattgaaagcgcttctaagggtggttacgtactacaagatgttgctaacccagatattattttagtggctactggttccgaagtgtctttgagtgttgaagctgctaagactttggccgcaaagaacatcaaggctcgtgttgtttctctaccagatttcttcacttttgacaaacaacccctagaatacagactatcagtcttaccagacaacgttccaatcatgtctgttgaagttttggctaccacatgttggggcaaatacgctcatcaatccttcggtattgacagatttggtgcctccggtaaggcaccagaagtcttcaagttcttcggtttcaccccagaaggtgttgctgaaagagctcaaaagaccattgcattctataagggtgacaagctaatttctcctttgaaaaaagctttctaaattctgatcgtagatcatcagatttgatatgatattatttgtgaaaaaatgaaataaaactttatacaacttaaatacaactttttttataaacgattaagca

SEQ ID NO: 3003 - DNA, 770 bp, Saccharomyces cerevisiae
aattgaaaccctgtgatttttgataagcgatagaaaactgagaagggaaagttaacacgaaaatgacaattgaaaaaccaaaaatatcggtcgcattcatttgtttgggtaacttctgtagatcaccaatggcggaagccattttcaaacatgaagtcgaaaaggctaatctagaaaatcgattcaacaagattgattcatttggcacttctaattatcatgtgggggaaagccctgatcatcgtacagtgtccatttgtaagcaacatggcgtcaagattaatcataaagggaaacaaataaagaccaaacacttcgatgaatatgactatataatcggtatggatgaatccaacattaataacctaaaaaaaatacaacctgaaggttctaaagctaaagtttgcctttttggtgattggaatactaatgatggcactgtgcagaccattattgaagatccttggtatggtgacatacaagatttcgagtacaacttcaaacaaatcacctatttctccaaacagtttttaaaaaaagagttataagctagcaagtaatgatggtgcggtctacatcgagtaaaaagataatatgtgaaggtgaagttaaagagtacaaattggagattttgaatactacatttacctagtaaatcacgatgagaattatataagtaaaaggaaactgtttacagtttttcgaaatcttcttcattatatacgaagtcgttaccgcaacgtctcgctaaccaactttttttataatca

SEQ ID NO: 3004 - DNA, 943 bp, Saccharomyces cerevisiae
acactaataagcaataaatctaatggcacaagaaatcactcacccaactattgtagacggctggttcagagaaatttctgataccatgtggccaggccaggccatgactttaaaagtggagaaagttttacaccatgagaagtcaaaatatcaagacgttttgatcttcaaatccactacatatggtaatgttctagttttagataatgtaattcaagccaccgaaagggatgaatttgcctaccaagaaatgattgcccatcttgccttgaattcccatccaaatcctaagaaggttcttgttattggtgggggtgatggtggtgttttgagagaggttgtcaagcatgattccgttgaggaagcctggttatgtgacattgatgaagctgttattagactatcaaaggagtacctaccagaaatggctgcctcttattctcacccaaaggttaagacccacattggtgatggtttccaatttttaagagattaccaaaacacatttgacgtaatcattactgactcttctgacccagaaggtccagctgaaacccttttccaaaaggaatatttccaattgttgaacagtgcgttgacagaaaagggtgtaatcactacacaagcagaaagtatgtggattcacttgccaatcattaaggacttaaagaaagcctgttctgaagttttcccagttgcagaatactctttcgttactattccaacttacccaactggtacgattggttttatggtttgctccaaagataaaacttgcaatgtcaagaagccactacgtgaaatctctgatgagaaggaggctgaattatacagatactataacaagaaaattcacgaagcttcctttgttctaccaacctgggcagccaaggaattaaattagggagaatatacatatatatgcatatgtttgtttagctaa

SEQ ID NO: 3005 - DNA, 639 bp, Saccharomyces cerevisiae
catatactccgctgctacctcctcaactaaacaatgactttgaataacgttgcaaggcccgacctttgtgtttcgtacaagaaaattgcgccaccaaaaggactatattctgccacaccaagcatatctggtgtggttaaccaatccatgcctatggccgctattttcttgaggaacaagttcattgcctggttctccctgattcagagtgtacactactacctgaacaccgacgaagacatcatcgttgcctataaggaaaataaggcaccatctccaatggaccagcctcctgcaatcaagctattcatgagtttaatcgggttatgcgtgtgttacatgaacttagttttccctcaacaaatagctcaaccatcgtctagcggctctaaaggtaatactgaaacgacaattgagacaactaccgaagtagagacggaaacagctaagcagtaggcttatcctatcctctatttccgccctgccccatcaaaaggaaggaaaaaatagtaaatacgggacttcctgtgtcgttttttcatttcctaggtttttttcaagtcttccctagtagtgtatgcacaaatatataaaattaaatacgtaaatacagcgtgctgcgtgctctactcaccaata

SEQ ID NO: 3006 - DNA, 956 bp, Saccharomyces cerevisiae
aaacatcgattccgttttgctaacaaatagcactcagcatcctgcataaaattggtataagatatggatttcacaaaaccagaaactgttttaaatctacaaaatattagagatgaattagttagaatggaggattcgatcatcttcaaatttattgagaggtcgcatttcgccacatgtccttcagtttatgaggcaaaccatccaggtttagaaattccgaattttaaaggatctttcttggattgggctctttcaaatcttgaaattgcgcattctcgcatcagaagattcgaatcacctgatgaaactcccttctttcctgacaagattcagaaatcattcttaccgagcattaactacccacaaattttggcgccttatgccccagaagttaattacaatgataaaataaaaaaagtttatattgaaaagattataccattaatttcgaaaagagatggtgatgataagaataacttcggttctgttgccactagagatatagaatgtttgcaaagcttgagtaggagaatccactttggcaagtttgttgctgaagccaagttccaatcggatatcccgctatacacaaagctgatcaaaagtaaagatgtcgaggggataatgaagaatatcaccaattctgccgttgaagaaaagattctagaaagattaactaagaaggctgaagtctatggtgtggaccctaccaacgagtcaggtgaaagaaggattactccagaatatttggtaaaaatttataaggaaattgttatacctatcactaaggaagttgaggtggaatacttgctaagaaggttggaagagtaagcatgaaggctatcacggtaacaattccacattgccgagtgattactacgcatatataaacacacacactcaccatatatatgtacgcatagtagcatctattgaatataagaagatagagt

SEQ ID NO: 3007 - DNA, 448 bp, Saccharomyces cerevisiae
atggtcaccccaagagaacctaagaagagaaccactagaaagaagaaggacccaaatgcccctaagagggctttgtccgcctacatgtttttcgctaacgaaaacagagatattgttcgttctgaaaatccagatatcacatttggacaagtcggcaagaagttgggtgagaagtggaaggctctaacgccagaggaaaagcagccttacgaggccaaggcccaggccgataagaagagatatgaatccgaaaaggagttatataacgccactttggcttagggatacttcctccccgcgtttttgtctgtgtgatttaatttcttttcctcttgttctttttgaaacttgctttattatctctctcctttctattcctcttttctctactgccctttttctatatctatacatatgattaaataaataaataaaaaaattgtattat

SEQ ID NO: 3008 - DNA, 773 bp, Saccharomyces cerevisiae
atgaaacagatagtcaaaagaagccatgccatcagaatagttgcagcattaggaatcataggcctgtggatgtttttctcgtctaatgaactatccatcgctacgccgggcctaatcaaggcgaagtctggtatagatgaagtgcaaggggcggctgctgagaagaacgacgctcggttgaaagagatcgagaagcaaaccattatgccattgatgggcgatgacaaggtgaagaaggaagtgggcagggcgtcgtggaagtacttccataccctgctggcccgttttccggacgagcctactcctgaagaaagagagaaactgcacacgtttattgggttgtatgcagaactctatccatgcggggaatgttcatatcactttgtaaagttgattgagaagtatcccgtacagacatctagcaggacggctgccgcaatgtggggatgccacattcacaacaaggtgaacgaatacctaaagaaagacatatatgactgtgctaccatcctggaggactacgattgtggatgtagtgacagcgacggtaaacgcgtgtctctcgagaaggaggctaaacagcacggttgaacaaagaaagattacattaatcaattatagtaatagtaaattttttattattttatattttaaatttttttactttctcagtatttatattacataaatatgtatatatcaaaaagtttctgtcgtagaagagacccgatccgaggttattgaatgtaagtgcgggaaagtgcagatagaat

SEQ ID NO: 3009 - DNA, 1688 bp, Saccharomyces cerevisiae
taatgcttagtagatcactaaataaagtagtcacatctataaagtcgtcttcgataatcaggatgtcatccgctaccgctgctgctacttctgctcctactgctaatgctgctaatgctctaaaagcttcaaaggctccaaagaaaggtaaactacaagtgtctttgaaaacacctaagggtacgaaggattgggctgatagtgatatggttatcagagaagccatttttagcactttatctggcctattcaagaagcatggtggtgtcactatcgacacacctgttttcgagttaagagaaattttagcaggcaagtatggtgaggactccaaactgatctacaacttggaggaccagggtggtgaattatgttctttacgttacgatttgaccgttccttttgccaggtacgttgccatgaacaatattcagagtatcaagaggtatcacattgcaaaagtctacagaagagaccaaccagccatgactaagggtcgtatgagagaattttaccagtgtgattttgacgttgcaggcacattcgaatctatggttcctgattccgaatgtttgtccattttagtggaaggtttgaccagtttgggaatcaaagatttcaaaatcaaattgaatcacaggaagattcttgatgggatcttccaaatcgctggtgttaaagatgaggatgtgaggaaaatctcttctgctgtcgataagttggacaaatctccatgggaagcagtcaagaaggaaatgaccgaagaaaaaggtcaatccgaagaaactgctgataaaatcggtgagtatgttaaattaaatggttctttgaaggaaattcacgctgttctatccgcagatgccaacattacttcaaacgaaaaggctaaacaaggtttggatgatattgctactttgatgaagtataccgaagcatttgacattgactcattcatctcttttgatctttctcttgcaagaggtttggattactatacaggtttgatctatgaagttgttacttctgcatctgctccaccagagaatgcttcagaattgaagaagaaggccaaatctgcagaagacgcgtcagaattcgttggtgtcggctctattgcagccggtggtcgatatgataatttggtcaacatgttctctgaagcttccggcaaaaaatctactcaaattccatgtgttggtatttcatttggtgttgaaagaatattttctttgatcaaacaaagaattaattcctctacaactataaagccaacggctacacaggtgttcgttatggcttttggtggtggtaaggactggactggttatttacccgaaagaatgaaggttactaagcaattatgggatgctggcattgaagctgaatatgtctataaggccaaggctaatcctaggaagcaattcgatgctgctgaaaaagcgggttgtcacattgccgtaatcctcggtaaggaggagtacttagaaggtaaattacgtgtcaaaagattgggccaagaatttgccgatgatgatggtgaattggttagtgcggctgacattgttcctattgttcaagaaaagttatcacaaattcatgaagatggtctaaatgaggtcactcgtttaattaaaggattataaacttgatagctcatgtatttacaaaccttcgtaaaactagacatg

SEQ ID NO: 3010 - DNA, 2750 bp, Saccharomyces cerevisiae
aaatattgaccatcttgatttagcaacgagaaagacctgaacaccataatgggctcttcgttgagaagctttatcaaagacgttcgtggtgccaaaacactggcagatgaaagggcaattataacgaaacaatctgctaaaattaggacaaaattgagagatgaccatctaccacatgaaaaaaggcgagtaaatatccagaaacttctgtatctatacattctaggggaaaagacacatttcggtcaggtggagtctatcaatttaattgcttctgacgattttgtcgataaaagattaggctatctggccgcaactttattgttggacgaatctgaagatttattgacactcttaacgaacatgttgaacaacgatttgcatcatcccaacaaatatgcagtgtcacttgcactaacctcattaggctttttgagctcccctgaattagccagagatttatacccagacgtcgaaaatatcatcaaaaattcaagagaccctttcctcttgaaaaaagcgcttcaatgtgctgccaaactaattttcaaagacgtttcacttttagaaatcttcaacatcgaagacattactaagatattgtctagtcattcaatatgtactcacggtgtacttttaggcgttacgaaaatcatacaatctattttgttaattggattgaacagaaaaaaagatgaggatgaagatgaagacggtattgattacagcaatgacatcttgtctccattatctttacttttgcgtgattttttcattcgtttggaaaatatgaattctaaaaatattgaacctggatatgatgtccaaggtatttgtgacccatttctgcagtgtgaaataatttacactttaaaactatactttcaagttggtgagctcttaaattcgaacaatgttttggactacaaagataatttctgcgatttattgactcgtattgcgacgaatacggattcaacgaaaaacagcggacaggccattctttatgagaccgtgaagacgatcttttcgttggatttgaaccagcctctacgtgtccttggtattaacatcttggccaagtttcttgcaggaaaagataataatactaaatacgtttcattaaacaccttattaaaagttgttccccaagagcctaccgcagtacaaaggcatagaaaattcatttctcattgtctgcaggataccgatgtgtcgatccgcatgagagcgttagagttgagcttcgccatcttggacgattcaaatttagtggaattggttaacgaattgatgaaatttttggcaaaacaggatgaagattcaaaagatctcataatatacactatagatcacttaattgacacttttgatacccgcgttgtcaaagatgaaagctggaaattagatgttttctttaatatcttaaaattagtgggatcgtttatcaactatgaaaaaattaatgatattctaatcataataaataatacgagccagttatccgacaaatctgaatttttacggaaaatgctgacaatttcactaaatggaacatcagcggagatttccgaggaaaatattggttggcagttggttttgatttggtgcattggcgaatatggcgatttagtactcaacgagggcaataaaaatggtgcagacataatcaatgagtcatctattactgattacttactaactttgcaagaactctacacagcaacgaatctgaagataatcaattacattttaacagcagcattaaaattatctgtgaggttccatgacgcgaaaaatattgaaaaactaagacaactgatattgagctacacggattccactgatttatcactgcaaatgaaaagcaatcaatacgagatatttttcaatcagtcaatttctgtgaagaagatcattttagaaacaatgcctaaatttgaaaaaattaccgaggaacaggataatggaaaagctctatcgaaaaaccttatctccaacgaaccagttgatctgctgtcagatttattgggtgaggatagcaaggctgaaagcaaggcttctactggtgacaatgtgaaaccaattgacatattagaagagatttttggagagaagaatgacattgctcaggtgcccaaaaatgcgaacaaggaagaatcaatcaatcattcgtcggcagtggaggcaaactcaggtgtcaccttaccattggatgccaacaagatatatgacagttcctcactgaatgtatatgcttccttgctctctgcaaactctggattagcacatttggatttatattttcaggcaaagtctttaatatctgacttaaaaactttctgtgccgttcctaaagctcaaaagctaacactaggccagttatatccatcttccacaataaacgccagccaaatttgcaagcagtcattgaaaatttctggatctgggaaactgaagttaagagttaagttggattttcatttaaatggctcttcatctatcaccaatgaacagttcgatcacaaattcgatgaaactctataaaaaatgcctttaaaattacagaacataacatgattaatgaccttgcgttggatggtctgtcgcgcatatcaagagacacgtcacgacacaacacgatgaatagaaatgctatcttctgggacaccataaacgactccaaaatattttatatgttaagtagcgatatataacaactaataacatatgtacttatatgctctcaa

SEQ ID NO: 3011 - DNA, 1298 bp, Saccharomyces cerevisiae
tgaggcctcgtcactggatttaccctattgaagaacgtataatggttgatttggagcaggaatttgcgctcggtgggcggtgtctggcattccatggtcctcttatgtatgaagcaaagatcttgaaaatatgggatccatcttcgaaaatgtataccagcattcctaatgacaagccaggtggtagttcacaagcaactaaggaaataaagccacaaaagctgggagaagatgaaagcattccagaagagatcattaatgggaagtgttttttcatacattaccaaggctggaagtcgagttgggatgagtgggttggatatgataggatacgggcctacaatgaagagaatattgccatgaaaaaaagactggcgaacgaggcgaaagaagctaagaaatcgttactggaacagcagaaaaaaaagaagctctccactagtctgggagggcctagtaatggtggaaaaagaaagggagacagccgctcgaatgctagtataagtaagagcacttcacagagttttttaacatcttcagtgagcggcaggaaaagcggaagaagttccgctaattccctccatcctggcagctctttgcgctcgtcatccgaccaaaatgggaatgatgaccgcagaagatcttcttcgctatcgccaaatatgctacatcatattgccggctatccaacccccaagatttcccttcaaattcccataaaattgaagagcgtgttagtcgacgattgggaatacgtaacgaaggacaaaaaaatttgcagactacccgctgatgtgacggtagagatggtactgaataaatacgaacatgaagtgagtcaagaattggaatcgccagggtcccagtcacagttgagcgaatactgtgccggtctcaagttgtattttgacaagtgcctgggtaatatgcttttatataggttggaacggctgcaatatgacgaacttctgaaaaaatcatcgaaggatcaaaagccactagtaccaattagaatttatggggctatccatctgttaaggttgataagtgttttaccagagctgatctcgtctactacaatggatctacaaagctgtcagcttttaatcaaacaaaccgaagacttcttggtttggttgttgatgcatgtggacgaatacttcaatgacaaggatccaaatagaagtgacgatgctctgtatgtaaatacgtctagccaatacgaaggagtggctttaggtatgtgagacgtttatattctagcttgggattatttctagtatttagttcttccgtat

SEQ ID NO: 3012 - DNA, 591 bp, Saccharomyces cerevisiae
gggaataacagagaacatgagcaaggctacgtgttcctttgagggctgtcatagtgcagttattaccatcaacgatgataacataataaacttaccagagcaggtgcacagcgaattcaagttgctggaaaacagaactatgcgagatgctacccccagcgagagcaacttcttggtcgtccctgatgtttgggactttgataatgttggtgtatctagagaaattccttcttctatattaggggatttgagtgataagagtgattttgtctttgagtatggtaattccagctggaagattaaaaagtgcttgaaatatttgatatgcgctgattgtgataaaggtcctattggaataatatgtaaggtgcaagatcagacaaagaatgaagaaagagttttgcatctactaagcttgcgaagccttcaaattatgggaaggaattagtttggtaggcactagaacaaaaataggttgccgccaccagaaaaaaaaaagagtaaccaaccacctatttcactggcatgggccacctataacaagctatagaagtagttctggtttacattactagcatcactttatgtaat

SEQ ID NO: 3013 - DNA, 923 bp, Saccharomyces cerevisiae
atggctaccaggactcaatttgaaaactccaatgaaatcggtgtattctccaaattaacgaatacttactgtttggttgctgttggtggttctgaaaacttttactctgcatttgaagctgaattaggagatgctattcccatcgttcataccactattgctggtacgcgtatcatcggtagaatgaccgcgggtaaccgtagaggtctgctagttccaacccaaactactgatcaagaattacaacatttaagaaatagtttgccggattccgttaagattcaaagggtagaggaaagactatctgccttgggtaacgtcatctgttgtaatgattacgttgctttagtgcatccagatatcgacagagaaactgaagaattgataagtgatgtactaggcgttgaggtcttccgtcaaaccatatcaggtaatatcttagttgggtcatattgttctttaagtaatcaaggtgggttagtgcatccacaaacaagtgtccaagatcaagaagaattgtcctccttattacaagttcctttggtggctggtaccgttaaccgtggtagttcagttgtcggtgccggtatggttgtgaacgattacttggcagttacaggtctggatactacagccccagaattgagtgttattgaaagtattttccgcttgcaagatgcccaaccagaatccatttcaggtaacctacgtgatactttgattgaaacctactcatagatgtcaggtactcctgaggggattcccctccttcctcaagtctgtttacagttgtatgcgaaagagtccccatgttgcaataatcttcttacgtatcatttgtggtattttttttggtataacaaatattttttcttaggtttctatgcattttaattttagttgtatgtatattatgtactctt

SEQ ID NO: 3014 - DNA, 1372 bp, Saccharomyces cerevisiae
gtaaggccaagtgaatttaacaaaggtgagggaagtataccaagttgctcgtttccttgtttcatagtattgactttcaaattttttaatcgttatttcgctaacatggcagaagtactgaccgtcctcgagcagccgaactcaattaaagattttctcaagcaggattcaaatattgcgtttctagctggtggagtagctggcgcggtttcccgaaccgttgtttcaccttttgagagagttaaaatactgctgcaagttcaaagttcaaccacttcttataaccgaggtatctttagctctatacggcaggtttaccatgaggagggaaccaaaggtttattcagaggaaatggtttgaactgcataagaatttttccctatagtgcagtccagtttgtagtatacgaagcttgtaagaaaaagttattccatgtaaatggcaataatggacaagaacaactaacgaacacccaaagactattcagtggtgcattgtgtggtggttgtagtgtggtggctacttacccgttggacttgatcaaaacaagactatcgattcagacagcaaatttgagcagtttaaaccgctcaaaggcaaaaagtatatcaaagcctccggggatctggcaattactaagcgaaacttacagactcgaaggcggtctcaggggattatataggggtgtatggccaacgagtcttggtgttgttccatatgtagcactaaactttgcagtttacgaacaattgagagaattcggtgtcaattcctccgatgctcagccttcctggaaaagtaacctctataaattaacaattggcgccataagtggaggggttgcgcaaacaatcacttatccctttgatctgctaagaagaagatttcaagttctcgcaatgggcggaaatgaactgggatttagatacacgagtgtctgggatgcgctcgtgacaatcggcagagcagaaggcgttagcggttactacaaaggcttagctgcaaacctttttaaagttgttccttcaactgcagtgagttggctagtttacgaagttgtatgtgattctgtaagaaattggtgagcttgaggtgacaggcttgggtcagcgaaaaccaagtaatgacgcgatccctccgctgaagaacgacatcctgtatatagcattaacttgtctatttttctttatatcggtcttgcagtatgggccaatcatatcgtacaaagcgggggatttcccgtactttatgatgagcatgagaacagactttaaaggcatcgccatctcctcaaaagcaactataactcttcccataccagtataagctaactttgttttgagacttatttaattttggtagtttcctgaa

SEQ ID NO: 3015 - DNA, 474 bp, Saccharomyces cerevisiae
caactataactcttcccataccagtataagctaactttgttttgagacttatttaattttggtagtttcctgaacgacttctgacaatactttaaaaaaagaaaaatatagaaaaatgagaccagcacagttactgttgaatacagctaaaaaaacatctggtggctacaaaatacccgtcgaattaacaccgttatttctcgctgttggtgtagctttatgctctgggacatacttcacatataagaaattaagaactgacgagactttgagattgacaggtaacccagaattatctagtttagatgaagtccttgccaaagataaggattaaaaaccatgttgatgatttgttatattaatatctacacttaaaacattttcaataattgtcgggaacaaatcgaaatattatttattcttcaaatatgacaaaactaatgtatattatatacatgtcaacaccaccatgac

SEQ ID NO: 3016 - DNA, 3789 bp, Saccharomyces cerevisiae
agtcttcctcaagaatattgacaaataaacgtagaattacgcatttggtgagatgagcaaagtgattaagccgcctggccaagccagaactgctgatttccgtaccttagaacgtgaatctaggttcatcaatccacctaaggataaatcagcatttccactattacaggaagctgttcaacctcatattgggtcttttaacgcattaacagaaggtccggatggaggtttgttaaatcttggtgttaaagacatcggtgaaaaagttatatttgatggaaaaccactcaattctgaagacgaaatatccaacagcggatacctcgggaataagctttctgttagtgtggaacaagtgtctattgcgaagccaatgtctaacgatggtgtttcttctgcagtagagagaaaagtttacccaagtgagtcaagacaaaggcttacttcttacagaggtaaattacttttaaagttgaagtggtccgtgaacaatggcgaggagaacttatttgaagtaagagattgtggtggtctaccagttatgctacagagtaacagatgtcacttgaacaagatgtcaccatatgaactggtacaacacaaggaagaatccgatgaaataggtggttatttcattgttaacggtatagaaaagcttattagaatgctgattgtgcaacgtagaaatcatcctatggctatcatcagaccttccttcgctaacaggggtgcatcctattctcattacggtattcaaattagatctgtcaggccggatcaaacttcccaaactaatgttttgcattacttaaatgacggtcaagttacatttagattttcttggagaaaaaatgaatatttagttcctgttgttatgattttaaaagccttgtgtcataccagcgatagggaaatttttgatggtattattggtaatgacgttaaggattcctttttgaccgatcgtttagaattactgttacgtggttttaagaaaagatatcctcatttacaaaatcgcacacaagtcttgcaatatttaggagacaaatttcgtgttgtctttcaagcttcccctgatcaatctgatttagaagtcggacaagaagtccttgatcgcatcgttctcgtgcatttgggtaaggatggcagccaggataaattcagaatgttattgttcatgatcagaaagttgtattccttggttgcaggcgaatgttctccagataacccagatgctacgcaacatcaagaagttcttttgggtggtttcttatatggtatgatcctaaaagaaaagattgatgagtacttacagaatattattgctcaagtcaggatggatattaaccgtggtatggccattaatttcaaagacaaaaggtacatgtcaagagttttaatgagggttaatgaaaacattggttccaaaatgcaatactttttatcaactggtaacctggtgtcccagtctgggttagatttacaacaagtttctggttatactgtggttgcagaaaaaattaacttctaccgttttatctctcattttagaatggttcatagaggctccttttttgcgcaattgaaaactaccacagtcagaaagttgctacctgagtcgtggggattcctgtgccctgttcatacaccagatggttctccttgtggtttattaaaccattttgcgcacaagtgtcgtatatcaactcagcaatctgacgtctcaagaattccttctatattatactcacttggtgttgctccggcatctcacacctttgctgctggtccttctctgtgttgtgttcaaattgatggtaaaattattggctgggtctctcatgaacaaggtaagatcattgcggatacattgagatattggaaagttgaaggcaagacgcctgggttaccgattgatctagaaattggatatgttcctccctcaactcgtggtcaatatccaggtctctacctatttggtggtcattctaggatgctgcgtcctgttcgttacctgcctttggataaagaagacattgttggaccttttgagcaagtgtacatgaacattgctgtcactcctcaagaaattcaaaataacgttcatacacacgtagaatttacgcccacaaatattctttctattttggctaatttgactccattttctgatttcaaccagtctccaagaaacatgtatcaatgtcagatgggtaaacaaacaatgggtactccgggtgtagctttgtgccatcgttccgacaataagctgtataggttgcaaacaggtcaaacgcctatcgtaaaagctaatttatatgatgattatggcatggataactttccaaacgggtttaatgctgttgttgcggtcatctcgtatactggttatgatatggatgatgcaatgattataaacaaatcagcagatgaaagaggtttcggttatggtactatgtataagactgagaaagtggatttagcacttaacagaaaccgtggtgacccaattacacagcattttggtttcgggaatgacgaatggccaaaggagtggcttgagaaattagacgaggatggtttgccatacattggcacttatgttgaagagggtgatccaatctgcgcatactttgacgatactttaaataagaccaaaatcaagacatatcactcctctgaaccagcatatatcgaagaggtaaatttaatcggtgatgaatccaataagttccaagaactacaaactgttagcataaaatatcgtattagaagaacgcctcaaattggtgataaattttcttctagacacggtcaaaaaggtgtttgttcaagaaaatggccaaccattgatatgccttttagcgaaacaggtatccaaccagacatcatcattaaccctcatgctttcccttcgcgtatgaccattggtatgttcgtcgaatctttagcaggtaaagcgggggcattgcatggtattgcacaggactctacaccttggatctttaacgaggacgataccccagccgattactttggtgagcaactagcgaaggcgggttacaactaccatggtaatgagccaatgtactcaggtgctactggtgaagaattaagggcagatatttatgttggtgttgtctactaccaaagattacgtcatatggtcaatgacaagttccaagttcgttccactggtcctgtgaatagtttgactatgcagcctgtcaaaggtagaaagagacatggtggtattcgtgtcggtgaaatggaaagagatgctttgattgggcatggtacatcttttctattacaagatcgtctgctaaattcatcagactacacacaggcatccgtatgtcgcgagtgtggttctattttgaccacgcaacagagtgtgccaagaattggttcgatttccaccgtttgttgccgtcgttgttccatgagattcgaagatgcaaagaagctattgactaaatcagaagatggagagaaaatttttattgacgactctcaaatttgggaagatggacaaggtaacaaatttgttggtggtaatgaaacaactacggtggccataccatttgtgttgaagtacttggactctgagctatccgcaatgggtataagattgcgttataatgtagagcccaaatagagaaatacccttctttccaaattgatatagaatggtaaatgaaggcttggtcaattgtatcatatagaggttttttattgaattacttatacaagagcgccccgcaatagaatatatatgtatga

SEQ ID NO: 3017 - DNA, 1149 bp, Saccharomyces cerevisiae
aacaattaaaataatcaacaaacaaaatctagtgatataatttactaccattaacggtaaagcagctaattgttaatttctatgtttaaatcattggctgctgtcttgcctagagctagcaaggcaaagttcctccagaaaaattacgcctccactttagctttcattgaaagctcaaaagatggctctgtttcaaggtcatcattgagtttattggctgctgcacaaaagttgtctaaccctatcacagctgtaatcacaggtagcaaagctgaaaaaactgctgaggcgctaaaatcttcatattcatgcagcaatttagaaaagcttgtcatatttgaagattcaaaattagatacctgtcttcccgaacaactaactccgttattagtgaaactattaaaaggcggcgactattcacattttgttgtctcaaactcctctgttggaaaaagtgttttacctcgggtgggtgcgctcttggacgtccaacctgtttgtgaggttactgtaatcaaagatcctaagacctttataaggccaatttatgcaggtaacattatttctacaatagaatgccaggcagaaaaaaaactgttgattattagggcatcagcttttccaccaattgcagagggtagtatggattctgttaccattgagaagagaactgatattcctccttgtgacttaaatgttacctgggttaaaactattcttaccaagagtgaaaggcctgaacttacttctgcacagaacgtggtaactggtggaagggcactcaaggataaggagacatttgagaagctattatcgccgctagcagatgttttgcacgctgctataggtgccacaagagcttctgttgataatggactatgtgataattctctacaaatcggtcagactggtaaggtagtcgcaccaaatttgtatatagccattggcgtttctggtgcagttcagcatttagcgggaatgaaggattcgaaagttatcgttgccattaacaatgatcctgatgcccctatatttaatgtcgctgactatgggttgcaaggggatctttacaaaatagtccctgaactaactgaaaaacttggtaaatataaataaataaattcttaacttctaaatatattcatctct

SEQ ID NO: 3018 - DNA, 2094 bp, Saccharomyces cerevisiae
agtgattaatggcaaagaagaataagaaggataaagaggccaaaaaggcacgtgctgaactgaagaatcagaaaaaccaaaaaaagcaggagaaaaagtttcagaagaacaagaataagtctttaaacggcgaagaagatgatgaaagtgatcaagatctcgatgaaattctctctagctttagcaaaaagcaaattgaattagagcatgtagacatcacttctgtggaaaaaccctcttgtcgtactcatccgttgatgtttgcaaatccgcaacacaataaacatgaattgttcattttcggtggtgaatttacagatccagaaaccaaactaacacatttctataatgatttgtattcatactccataaagaacaactcttggaaaaaatacgtttcgcaaaatgcacctttgcccagatccagtgccgctgtcgctgtgcatccttccggaatagcactgttacacggtggtgaattttcgtccccaaaacaatctaaattctaccactattctgatacatggctgtttgactgcgttgaaaggaaattcactaagttggagtttggcggtagagactcttcacccagcgccagatcaggtcatagaattattgcttggaaaaactatttcatattatttggtggatttagagatttggggaatggtcaaacttcttacctaaatgatttgtggtgttttgatatctcaacctacaaatggaccaaattggagacaaacagcaaacctgacgctagatcgggtcattgtttcattcctacagataattctgccatattaatgggtggttactgtaaaatcattgccaaaaataataaaaatttaatgaagggaaaaatcttgaatgatgcatggaaactgaacttaacgcctgatccaaagaagtggcagtgggaaaaattaaagaatttcaagaaccagccctcaccaagagtcgggtattcgttcaatctatggaagcaaaacaagtccgttgcttttggtggtgtctacgatttacaagagacagaggaatccttagagtccgttttctataacgacctatatatgttccacctagagttgaacaaatggtctaaacttagaattaaacctcagcgtcaaacgaatagtaaaaattcacccgccacaagtaaaagaaaatctaataaagatcaagaaaaggaactgcaggatttactaaattccattctggccaagtctaatctaaatgacgacgacgatgacaatgatgacaacagcacaacgggtcctaactctatcgatgacgacgaagataacgaagatgacagtgatttggacaaccaagaagatattaccatctcaaatcaattacctcacccaagatttaacgcagcaacttgtgtagtgggcgactcgttgttcatttacagtggtgtctgggaactgggcgaaaaagattatcctataaactcattttatagtatagatttgaacaagttggatggtgtcaaggtttactgggaagacctatctgccatcgaagaagcaaagagactaggtgatagagattcggacgaagatgagtttgaatacgaggacgatgaggaggatgaggacgacggcgaagaggaacaagatgcaggaccccttgaaggtgatgaagatgaggaaagcgagagcgacgatgacaaacaagcgcagatggagattccagacgaaaggtcttggctaccacacccaaaaccgttcgaaactttaagagcattctacttaagggaaggtgcaaatttcttaacctggtctatttctaacaacagaaaccttaagggtaaacagttaaagacgaagtcatttgagttatgtgaagaccgttggtgggaaagaagagatcaggtgacccttgaggaagagcgtctggaggatacaggcggaatcattgaaagagatacgactactaaaccttccaaaagaaggtaaacattttcgcttttgtagttgagtttaaaaagtatttatagcattttttttttttatagatatctgtcttccatatggcatccttttctttagtcactaattgagtcatctggaaaaaaaaacaaaggag

SEQ ID NO: 3019 - DNA, 2009 bp, Saccharomyces cerevisiae
ataatatcaaggacaacttacttttattttaacatctactttacttcatcgtcaaattttcttcttatatacagcattgctagactctatagctgccaattcattcgcttaccacatcataatttgcatacaaaagaaaatcttttcttttttccattcattcattaaatttaacgacagacaatggctagtgctgaaccaagaccccgtatgggactcgtcatcaatgctaaaccggactactatccgattgagctatctaatgcagaattactttctcacttcgaaatgctgcaagaataccaccaagaaatctccaccaatgttattgctcaatcatgtaagttcaaacctaatccaaaactaatagaccagcagcctgaaatgaaccccgtggaaacaaggtccaacattatcacttttttgttcgagctgtctgtggtcactcgagtgacaaatggtattttttttcattcagttagattatatgaccgctattgttccaagagaatcgtgttacgggaccaagccaaattggttgtcgctacttgtctctggttggctgctaaaacttggggcggttgtaatcacatcatcaataatgtagtcatccctactggcggaagattttatggtcccaacccaagggcacgtatacctcgactctctgaactagttcattactgtggtgatggtcaggtctttgatgaatcaatgtttttacaaatggaaagacatatactagacactttaaattggaacatttatgaaccaatgatcaatgattacgttttaaatgttgatgaaaattgtttgatgcaatacgaactttatgaaaatcaagttacttatgacaaacaatgctctgaaaaacgtcagtctcaattatcccaggatagtgatgccactgtagacgagaggccctaccaaaacgaagaagaagaagaagaagacttaaaactaaagatcaagttgattaatttgaaaaaattcttgattgatgtatccgcgtggcagtacgacttacttagatatgaacttttcgaagtatcgcacggcatattctccattatcaatcaattcaccaatcaagaccacggtccttttttaatgactccaatgacatcagaaagcaaaaatggtgaaattttgagtaccttaatgaacggcattgtttccattcctaactccttgatggaagtgtataaaacggtcaatggtgttctacccttcattaatcaagtgaaagaatatcacttggatctacaaagaaaactgcaaattgcatccaacttgaacatttcgagaaagcttaccatatcaaccccatcatgctctttcgaaaattcaaatagcacatccattccttcgcccgcttcctcatctcaaagccacactccaatgagaaacatgagctcactctctgataacagcgttttcagccggaatatggaacaatcatcaccaatcactccaagtatgtaccaatttggtcagcagcagtcaaacagtatatgtggtagcaccgttagtgtgaatagtctggtgaatacaaataacaaacaaaggatctacgaacaaatcacgggtcctaacagcaataacgcaaccaatgattatattgatttgctaaacctaaatgagtctaacaaggaaaaccaaaatcccgcaacggcgcattacctcaatgggggcccacccaagacaagcttcattaaccatggaatgttcccctcgccaactgggaccataaatagcggtaaatctagcagtgcctcatctttaatttcttttggtatgggcaatacccaagtaatatagttcctgttcttttcatgataaatgaatgccaatttgccaaacgtaccaaaaagagaccaatattataagatttataaaagaaaagctttcatattctgcgggaaaagagagaccacatactcagtttatcgctataattttaacggtatatatttatatttttgtaaatcaatgaaacagccaactaa

SEQ ID NO: 3020 - DNA, 625 bp, Saccharomyces cerevisiae
atgctgaaaattgttactcgggctggacacacagctagaatatcgaacatcgcagcacatcttttacgcacctctccatctctgctcacacgcaccaccacaaccacaagatttctgcccttctctacgtcttcgttcttaaaccatggccatttgaaaaaaccgaaaccaggcgaagaactgaagataacttttattctgaaggatggctcccagaagacgtacgaagtctgtgagggcgaaaccatcctggacatcgctcaaggtcacaacctggacatggagggcgcatgcggcggttcttgtgcctgctccacctgtcacgtcatcgttgatccagactactacgatgccctgccggaacctgaagatgatgaaaacgatatgctcgatcttgcttacgggctaacagagacaagcaggcttgggtgccagattaagatgtcaaaagatatcgatgggattagagtcgctctgccccagatgacaagaaacgttaataacaacgattttagttaatgtctgcatttttacccctcatttgtgcccccaatttctcctgtgaataatctatatatatatatttataattataattataaggaaacaagtcaactttataata

SEQ ID NO: 3021 - DNA, 642 bp, Saccharomyces cerevisiae
ccaaactaaattggctacaccaaaccaaccaaacttacacacaataatatacaattacaattatttacaatgtcctctgtggaatcttcccccatctcgcgctatgaagacgaggtcttccctctttcgttttcaaacgttgctttcgagccccctatgctctcgcatagcccggacagatcgacttatgccgatgacttttctcaatcttaccagcaagaattgctaacttttccgctatcgtacccgattgtcgatgagtcagaatgcacgcacactaaagataagacggacagcaacataataacgagtactgaagacgattgcatgttcgatatggaatttaacggcaacgccgccagtgcagttgctgctgctagtaaggaatctaactctgcctctgggtttgcctttgcaagtaacgatgcctttgccaatgtcgcacaacagaactacagactgtggttgtcatcggtatgacgcattttaccacatctctacttgttctcacgaccccttgcatcgcatatcctacacattttaaatcggcattccttccaagcatattcttaattcctaattttacatagtttttttttttttttagagaaaataacaacaatatacatagaacttacttac

SEQ ID NO: 3022 - DNA, 459 bp, Saccharomyces cerevisiae
cagaatagagaagcaaggataatacaaaatggctgtcaagactggtatcgctattggtttgaacaagggtaagaaagtcacccaaatgactccagccccaaagatctcctacaagaagggtgctgcctccaacagaaccaagttcgtcagatctttggttagagaaatcgccggtttgtccccatatgaaagaagattgatcgatttgatcagaaactccggtgaaaagagagccagaaaggtcgccaagaagagattgggttctttcaccagagccaaggctaaggtcgaagaaatgaacaacatcattgctgcctctcgtcgtcattaaacagcgtgagggggccacagtcaagcaaatccaactccgccacaagaccgagtgctattttccatggctctcccccaaagctagttaataaaaaataagtaacaaatcattatagtaattcttaatcg

SEQ ID NO: 3023 - DNA, 1725 bp, Saccharomyces cerevisiae
agagtggcatacaacctaaagggtcaacagacaacaagaaggaaaggaattataggagcaaatacacgcccttcaaatggatccctttcacaatggcaataaaaggagctcaatatcgtttggctcatcgcagcggcagccatataacaagaacaattacttgagtggtactaatgggccttcctcggcggcacaagatcaaggtagaggcccatctccctttggaatgtctggcaacactaccaatggcggtaacagcaaaaggaatagtggctgtgacctaagtgccacgtactatgcaagtcgatcgccgatgtattcaccgttagatttctcgccaccagttttttcaccaaatcattctcagttacagcaggcgaggggctatgctgcaaatattccggttgtaagcaatctgatgaacccttccatggcctccgtgtgcgaatatcaatcacactatccactctttgggctcgattggagcgccgacgactacgtctgcttgggttcgtacaaagaggacagcagaaataagttgcaggttctgcactctaatgatctactgagctgggaaagcgtagtggacgcagatgtggtttatcctgtgagcaaaatccaatgggtcccctctcaattgtatccaaggaaactcgcgacgtgttctgactccttacggatttggagcgttagccctgaggaaagacagttccaagaacaaataaatctatctctgtgtaaatacaatagacagcaccccgccaatcccgcggccgcagatgacatgaaggtcataggcactttcccaccaataacatcatttgactggaacacggtcgatactaacttgataatctcaagttccatcgacaccacatgcattgtatgggatctgcaaagcagtcactacgttaagacccaattgatcgctcacgacagcgaagtttttgatgtaaggtttttgacaaaatcgacccaattatttgctagttgtggtggggacggtagtgtacgagtatttgatttaagatcgcttgcgcacagtacaattatttacgagcctccctcttcctcagtgtctggagccactgcgggtactataacaccgtcgtcgaaaggttcggacgccttattgaggctggagccatcaccgtatgacccaaatgtgttggccacttttgcagctgactcgaacaaaatcattattctagatatgaggaacccagaatcccctatactaaacttacaaggccacggttcttcggtaaacgggattaaatggcatcccacaaagcgcaatgttttgctctcgtgcggagatgactgccaggtgctctattgggacttgaacagctcctttatggaaattaacgctgcaggtagcaaatcccccagtattcatggaacttccttggaggaccctgacggcgacacagagatgacagacggtggcgcaggatccggtttaaacgaggatcccttaagtttaaacaacaacagcaagcaggtgtgcaagacactagagactcctaacatgatgtatgccaataaaacacaagagataaacaacattgcatggaggccccagaggggcgattggtttgggtgcgtgagcggcaagaagtttcaaaacgtccgcgtcctttgagacagcattcgcccagtattttttttattctacaaaccttctataatttcaaagtatttacataattctgtatcagt

SEQ ID NO: 3024 - DNA, 980 bp, Saccharomyces cerevisiae
ctttttttttttttttttgaactgcatcgatacaagaagaatagggggatgggaaaggcttaattggaagcactgagaacagcaattcactctggttgttaggttgtgctatttggtcgtgctatgaattggaagtcgtacgtttttcccggtggtcatccaccagctgcgttgaccacaggccttgtggtatttctaaccgctatttacctgttaagttttatttttgccctaagggaagacctgtcgttggcgccagagtcattgttcaaactgcaaatgagcaggctatcgctttatcctttaattcacctatcattgcctcatttactgttcaatgtgctagccatctgggcacccttgaatctcttcgaagaaacgcatgggactgtgtacacaggtgtttttttgaacctgagtgctctatttgccggaattctgtactgtttgttgggtaagttgctatatccagaagcattagttgcaggcgccagtgggtggtgtttcaccttattcgcatactatagttttaaagaatcacagatccgccctagaacaaggatctttcgcacagactactcaattccgacattatatacacccctagtactattagtcgcaattgccgtcgttatacctggctccagtttctggggtcattttttcggcttatgtgtcggttacgccataggctacaaggaatcgtggtttaacaagatcactccaccaggatggatcatcaccaaaatcgaaaaaagtttagacggtttaattcgattaataccttggggaattaagtattacagagatgaggatatcgacagaactaaagattacgaaccgttaatgtccacagaaacaccattgcctctccacaatgacaactccggcactgtcctagggactgcctagacatttgtatcgctattctttctttcacagtttaaggatgtatataaatgtagtatatatcattttat

SEQ ID NO: 3025 - DNA, 1181 bp, Saccharomyces cerevisiae
aacgtaacaagaagaagtaaacaaggcagtattcgtatatttgtatggcgggaagtacatccagtttggtgatctgtgcgattggtatatatgctacttttttgacgtgggcattagtacaggagcctttggctacaagaacctggccaaactccatgggaaagtttcaattccctaatgtaatatccctcatacaagcttctgtggcaatgatgatgggctacctgtacttaaactggaagaaggtggaatatccgcccagaaaaatgattaaagatcattggaaacaattgatgttgatatcatttacacagagtagttcaggcccgctggctacaacttctttaaagcacgtggattatctcacttacatgttagcaaagtcatgcaagatgatccccgtgttgttggtgcatttgcttttgtataggacgcccatagcaagccaaaaaaaagttgtagctctcttggtaagtctcggtgtcactattttcactataggtggcaacgatggtaaaaagttgaagagatcctttaatgagagcggaaatgataacaaattacaagggtttggactacttttctctagtttattccttgatggattgaccaacgccacccaagataagctactaaaggccaataaggccaaagaaaagggaaaacaaactttgataacaggtgcacacttgatgtttacactgaacctcttcgtgatattgtggaatattttgtattttattgtgatcgactgcaaacaatgggataatgccgtttctgtattgacgatggacccacaagtgtggggctatttaatgctttattcgttctgtggcgctatgggacaatgctttattttctatactctagaacaatttggctctttagttttgatcatgataacagtcaccaggaaaatggtctcgatgattttgagtattattgtcttcggtaagagtgtacgtttccagcaatgggtggggatgtttatagtatttggtggaatcacttgggaagcactcaacaagaagaaggctaatataccgaaggcaaaatctgcgtagattagtgaagatcgcaacaaataaaagttaatatttataaaatttgtctatactatgtacttcctatttttttgatggacgaagcagtctctctcttaattcaggatcgtatgcata

SEQ ID NO: 3026 - DNA, 875 bp, Saccharomyces cerevisiae
atggactttactgcgaagataaaggagctcgaacgagaactctcagagacgagtgactataagaccttgcagaagaagaccataagtcttcgaagtgagctgaatactctgtcacattctttgacatcttatgaaaaagaacacttctccaatgatatagaaaatgtattaaaatctattaatgcaaaattatctgagtcaaagggcaaaaaacgactattctccttcaaacagaaaaattcatcatcagccgttcataagaatgttgaacgtacggagcttgcgaatgcgccggcgtataccactactttgaaaaagcattatgtcttggagaagggtgattcagcttttgaaaatttagagttttgtactgttacatcaacaacagattatagtggcaatagtgccctttctggttctttgtgctttcgcaatattactaaatgtgtcataaacttacaaaggattttctttcaaacagggagtattttcataactgattgtacggattctataatttttctacggtctccttccgacaaggatttccaaatccgtttacgtgacttgaaaaattgcaaaattttgatagagaaactctcgccaagtatcgattgcaaacaagtggtaatcatagaaaattgtcacaaatgcattttcaacgcaagcactcgggaccacctaattatacaagatttctctaaccccttccaaagcgaagaaactgaggacaattctgcctttgcatttgaagattttgatatttgtaacaaggatacaatgcagttgtttcgcgcttacttatagcgctttatattgagctacgcatcgctaaaattgtttatttcgtatatagtgatttaagcatgccatta

SEQ ID NO: 3027 - DNA, 2264 bp, Saccharomyces cerevisiae
agtcctataaacaaaagcacaaacaaacacgcaaagatatggctagtgaaacttttgaatttcaagctgaaattactcagttgatgagtttgatcatcaacaccgtctattctaacaaggaaattttcttgagagaactgatatctaatgcctcggatgcgttggataaaattagatacaaatctttgtctgatccaaagcaattggaaacagaaccagatctctttattagaatcactccaaagccagagcaaaaagttttggaaatcagagattctggtattggtatgaccaaggctgaattgattaataacttgggtaccattgccaagtctggtaccaaagccttcatggaagctctatctgctggtgccgatgtatccatgattggtcaattcggtgttggtttttactctttattcttagttgccgacagagttcaggttatttcaaagagcaacgacgacgaacaatacatctgggaatccaacgctggtggttctttcactgttactctagacgaagttaatgaaagaattggtaggggtaccatcttgaggttattcttgaaagatgaccaattggagtacttggaagaaaagagaataaaggaagttatcaagagacattctgagttcgtggcctacccaatccaattagtcgtcaccaaggaagttgaaaaggaagttccaattccagaagaagaaaagaaagacgaggaaaagaaggatgaggaaaagaaggatgaagacgacaagaaaccaaaattggaagaagtcgatgaagaagaggaaaagaagccaaagacgaaaaaagttaaagaagaagttcaagagatagaagaactaaacaagactaagcctttgtggactagaaacccatctgatatcactcaagaagaatacaatgctttctataagtctatttcaaacgactgggaagacccattgtacgttaagcatttctccgttgaaggtcaattggaatttagagctatcttattcattccaaagagagcaccattcgacttgtttgagagtaaaaagaagaagaataatatcaagttgtacgttcgtcgtgttttcatcactgatgaagctgaagacttgattccagagtggttatctttcgtcaagggtgttgttgactctgaggatttaccattgaatttgtccagagaaatgttacaacaaaataagatcatgaaggttattagaaagaacattgtcaaaaagttgattgaagccttcaacgaaattgctgaagactctgaacaatttgaaaagttctactcggctttctccaaaaatatcaagttgggtgtacatgaagatacccaaaacagggctgctttggctaagttgttacgttacaactctaccaagtccgtagatgagttgacttccttaactgattacgttaccagaatgccagaacaccaaaagaacatctactacatcactggtgaatctctaaaggctgtcgaaaagtctccatttttggatgccttgaaggctaaaaacttcgaggttttgttcttgaccgacccaattgatgaatacgccttcactcaattgaaggaattcgaaggtaaaactttggttgacattactaaagatttcgaattggaagaaactgacgaagaaaaagctgaaagagagaaggagatcaaagaatatgaaccattgaccaaggccttgaaagaaattttgggtgaccaagtggagaaagttgttgtttcttacaaattgttggatgccccagctgctatcagaactggtcaatttggttggtctgctaacatggaaagaatcatgaaggctcaagccttgagagactcttccatgtcctcctacatgtcttccaagaagactttcgaaatttctccaaaatctccaattatcaaggaattgaaaaagagagttgacgaaggtggtgctcaagacaagactgtcaaggacttgactaagttattatatgaaactgctttgttgacttccggcttcagtttggacgaaccaacttcctttgcatcaagaattaacagattgatctctttgggtttgaacattgatgaggatgaagaaacagagactgctccagaagcatccaccgcagctccggttgaagaggttccagctgacaccgaaatggaagaggtagattaggtagaacatcatggccttgaataggttataaacaaaacataatataacgtataggtattcgaatgaataaataagtatgtaaatagggcatctgca

SEQ ID NO: 3028 - DNA, 663 bp, Saccharomyces cerevisiae
gcaaagcaagagtcggaggaggaaagggtccattctattattctctgtaaacatgtcaacgcaactcgcaagtaacatatatgctccattgtacgctccctttttcgggttcgcaggttgtgcagctgccatggtgctttcctgtttgggagctgccattggtacagctaagtcaggtattggtatcgccggtataggtactttcaagccggaattgatcatgaagtctttgattcctgtggttatgagtggtatcttagccatttatgggcttgttgtggccgttttaattgcaggtaatttatctcctaccgaagactatactctcttcaatgggttcatgcacttgagttgtgggctctgtgtgggatttgcctgtttgagtagtggctacgccattggtatggtcggtgacgttggtgttagaaagtatatgcaccaaccaaggctttttgtcggtatcgttttgattctaattttctctgaagttttagggttatatggtatgattgtagctttgattttgaacactagaggctctgaatgagtcaaaagtttaaaaaaaaaaaataattacaataaaaaaattttttctcatatacacgcaccaacccccttcatatatgtatagaatatagtatatattataatactgctatctat

SEQ ID NO: 3029 - DNA, 1197 bp, Saccharomyces cerevisiae
gcacaaaggaccatagtcactgtggaaaggtagtggtatctaattggatgctgtaaggatagattaggtgcttttgataacgtaagaaagggacaaaaacagagaggcagccaaaaattacacaaagcacaacaaaaatgagagcgttgagattcctgattgagaacagaaacactgtcttttttacgctcttagtagccttggtgctttcactgtatttattggtctatttattttcgcatacaccaaggccgccatatccagaggagctcaaatacatagctattgatgaaaaaggtcatgaagttagtcgtgccttacctaacttgaatgaacaccaagatgacgaagaaatatttttatctgttgttatcccaagctataatgagacaggtagaattttactaatgttgacagacgcaatcagctttttaaaggaaaaatatggttccagatgggagattgtcatagtggatgatggttccacagataataccacacaatactgtttgaaaatttgtaaagaacagttcaaattgaactacgaacaattcagaatcatcaagttttctcaaaacagaggcaaaggtggcgcagtgagacaaggttttttacatattagaggtaagtatggtctttttgccgatgctgatggtgctagtaagttcagtgatgtagaaaaactaatagatgctattagcaaaattgaaacgtctagtacagatctaaaaacgactaaaccagcagtagcaattggttccagagcacatatggtaaataccgaagccgtcataaagagatcaatgataagaaactgcttgatgtacggtttccataccttagttttcatcttcggcatcaggtctatcaaagacacacaatgtggattcaaattgttcaacagagccgctatattgaaaatttttccgtatttgcatacagagggttggatctttgacgttgaaattttgatcttagccatcagaaaaagaatccaaattgaggagataccaatttcctggcatgaggttgatggctctaagatggctttagctattgatagtatcaaaatggcgaaagacttggttattataagaatggcctatttattagggatatatagagataataagaaatgttagagtaattatttttatgttattattatcattattattattattacataagctttca

SEQ ID NO: 3030 - DNA, 1795 bp, Saccharomyces cerevisiae
ttgtgctgggcaacaacttttttttacgatttctttttacctctcatctaggttagtgttagttgtaaaaacccgagcagattggtgccttttcaagtgcgttcttacaaccatacttttttattctagaacgtgtaagcaattactttctcaaaaaagcaaacgcaataaagatatgctacggataagtattgactctatcaagcaattcggttcctttgtgacaggttataacaacactagttaccatgctgccgggagggccataagaacatcaagcctgtacagtacaatgatctcagccaacccgagaaggtgcctgcattcttcgaaactgctaaataaagaaggtcaagaagagggctataatgaacagctcatttcaaaaatgtcttcacagaatggatcgaattccagacagaatgaaagtgaaggaaagaaggaaggcaaggcttcctctgtgaagtcgttgttgcaacatactcatagtcacagccacacacatatgcatgacaatcctttattgtcactgaacgtacagcagatcaagaagaatcctggcgtaagaataacatggataggacttgcatcaaatgtggggatggcagtaggaaaatttgtaggaggaatcacttttcattctcaagcattacttgctgattccgtacatgctcttagcgatttggtatctgattttttaacactgttttctgtccaatatgcgtctcgtaaaccaacttcggagtacccatatggctatggtaaagtggaaactgtgggatctttggcagtatccacaatcttagcaatggctggtatatctatcggttggtcgtcgttatgcgctattgtggggcctgtcattcctcatgccattctagaatcgatggccggtttaattggtgaaacgcattcccattctcagtcgctaacacaacaggcaactaatgtaaatgctgtatggatagcagcgggttctatcttggttaaagaatgggtttttcaggcaacaaagaaagttgcaatccaaacaaattctaatgtactaatggcaaacgcctggcatcatcgtgttgactccttgacatcgttggtagcgttggtcgctatcacatctagttattttttcaacattcaatccttagataatttaggtgggcttgtagtgtcaggtttgatcataaaaacaggtggacaaggtatcttatcctcactgaaggagttagttgaccaatctataccacctactgatccgcgttatctagaaatcgaatctgtcataaaagacagcattggcagtttgaaaacagacttagatctcaaacagtcgttacatgttagagaccttactatattagcttccggtcctaatcttcgtgccaccacaactttggaagtgccagtattacattcaggtcaggaagttgggataagatttttggaaaacgctatttcgactataagagaggatttacgtatgaaggtgccaaacgtgggaaggtggacgtcgagtttgttgatgtaacctctgactctaaaggtgatttggagcactctcatgacactaaatcaacaaatcatactcatactcattctgattctgccgatactcacacccataaacattagggaattctcaatgatgaattttttcaaaagttaagagcaaaagtacagcctttcacatttcaacaatttactgagcttaatatatatatgtatatatatatatgttgaacaaggaagaatgccttgtgttgttcctttgtataaagtaatgtattctatataatca

SEQ ID NO: 3031 - DNA, 1721 bp, Saccharomyces cerevisiae
aaccatggttctcaagaccaaatcactctgaagctaaattatttaaatcaaacagcggaaatggtatttactaaggaagaagttgattactcattatatctggttacagattctaccatgcttccaccgggaactactttatgttctcaggttgaagctgggttgaaaaatggtgtaacgctagttcaaatccgtgaaaaggatattgaaacaaaaaatttcgttgcagaggctttagaagttcaaaaaatatgtaagaagtacaatgttccacttattatcaatgaccgtatagacgtcgctatggcaattgacgccgatggggttcatgtgggccaggacgatatgccaatcccaatggtaagaaaacttttgggcccttctaaaattcttggatggagtgttggtaaaccttcggaggtagagacattggctaaatgggggccagatatggtagattatattggtgttggtactcttttccctacatcaacaaagaaaaatcctaagaaatcacccatgggtcctcaaggcgccattgccattttggatgctttggaggaatttaaagctacatggtgtagaaccgttggtattggtggtcttcatcctgacaatattcaacgtgtgctttgtcaatgtgttgcttcaaatggaaagagatcgttggatggtatctctctagtcagcgatattatggccgctccagatgcatgtgcagcaaccaagaggttgagaggcttgttagatgctaccagataccaatttgttgagtgcgagttaaataatacatttccgaccacaacttcaattcaaaacgttatatctcaagtatcaaacaatcgtccattagtgcaacatatcaccaataaggttcatcaaaattttggtgccaatgtcactctagctttaggctcatctcctatcatgtctgaaattgaaagtgaagtatctgaactagcaagaatcccaaatgcttctttactgttaaataccggatcagtggcacctattgaaatgctaaaagccgcaattaatgcttataatgaagtaaatagacccatcacctttgacccggtcgggtacagcgccactgaaacaaggctctgtctaaacaacactttgctcacttacggccaatttgcttgtataaagggcaattgcagtgaaatactgtctctagccaagttaaataaccataaaatgaagggcgtcgactctagcagcggcaaaacgaacatcgacacacttgtgcgcgctacacaaattgtggcattccaatacaggactgttgctgtttgcacgggtgagtttgattgcgttgctgatggtacttttggaggcgaatacaaactttcatcaggaacagaaggaataaccgctgaagatcttccatgtgtaataattgaagatggcccaattcctatcatgggtgacatcactgcaagtggatgttcacttggttctacaattgcttcctttatcggtgggttagattccactggaaaactgtttgatgctgtggttggtgctgtcctattatacaaatcagctggtaagttggcttccacccgttgtcaaggaagtggttcattccatgtcgaattgattgacgcattatatcaattattccatgaaaataaaccagaaaagtggtccgcttctttgaagaaattcaaataaactatttacaacgtaatgattttataaactgattaaat

SEQ ID NO: 3032 - DNA, 1826 bp, Saccharomyces cerevisiae
taaagtgctagtaaataacaattataagtgatatcaaggatgtctgaagagaatttgaggcctgcctatgacgatcaagttaatgaggatgtctacaagagaggcgctcagagcaaattgaccaaagctcgtaaggcagacttcgacgatgaaaaggacaaaaaaaaggataatgacaaacacatagataaaagaccaaaaagcggtcctcgtttggatgaaaatggcaatccacttcccaaggagcctcgtctcccaaagagaaaggtggctgttatggttggttactgtggtactggctaccatggtatgcaatataatccaccaaatccaaccatcgagtctgccctattcaaagcatttgttgaagcaggtgctatttccaaggacaactccaacgatttgaaaaagaatggattcatgagagctgcaagaactgataagggtgtccatgctggaggtaatttaatatcattgaaaatgattattgaagatcctgatatcaagcagaagatcaacgaaaagttaccggaagggataagggtatgggatatcgagcgtgtgaacaaggcgtttgattgtagaaaaatgtgcagttcacgttggtacgaatacttattaccaacttattcactcattggccccaaacctggttctatactttatagagacatcgaagaaagtaaaacagaattacctggtgtattagatgaagatttggaatccaaagaattttgggaagagtttaaaaaagatgcgaatgaaaaattttcaacagaagaaatcgaagctatattagcatatgttccgcccgcaagagatgaatttgatataaatgaagaactataccagaaggtaaaaaagtacaagcaattagaaaatgctcaccgtagaagatatcgtatatccgcggcaaaactggccaaattccgtgcttctacaagtcaataccttggcgctcataacttccataattttacattaggcaaggacttcaaagaaccaagtgccattcgatttatgaaagatataaaagtatctgatccatttgttattggcgatgcccaaacagaatggatttccatcaagattcacggccagtctttcatgctacatcaaattcgtaagatggtatcaatggcaaccttaattacccgttgtggttgccccgtcgaacgcattagtcaggcttacggacagcagaagattaatattccgaaggcacctgcattaggattattgttagaagctccagtatttgaaggttataataaaagactagaacagtttggttacaaggcgatcgatttttccaaatatcaagacgaagtggataagttcaaaatgaagcatatctacgataagatctacaaggaagaggtggacgaaaatgtttttaatgcgttctttagttatattgatagtttcaacaaggttactggagcacagggagaagaaactgccgataaatcgggacctgctgtgcaaaagagtatcttcgaattcttgacagctaagggtatcccaggtcttactgatgcgcccgagagcaataagaagattaagcaaagaaaaagaatggaagaggaggaagctgctagtaaaaaggctgaaatatccagcaccactcagagcaacgaacctgaagtacaaccggaagcggcagctaattaggttgccctttccttctttcttaccaactttaatttctaaggcattgacattgaaattgacattgtcctctaatgtttatagagcaccattatttgttttcgttttatatattattatataatggcacagaataatttataattctttttttt

SEQ ID NO: 3033 - DNA, 2088 bp, Saccharomyces cerevisiae
gaggaaaacaagctgaaaattgctatgcattaaagtagcagatttactttgttgagttggttctgatcaataataagagtaatgaaagaaagcaaaaaaatggctaaagataatttaactaatttgctctctcaattgaacattcaattgtctcaagacgagcattcgcaggtcgaacagacttgcgtgaaactattggattctggatgtgagaatccagcggatgtatttagacgttgcttagtagctgttatccaacaggacaagtatcaaaaggctttacattatttaaaaaaattcaaacatatagatgacaagtacggtcgcaaatttgcgctagaaaaattgtacattttctataaattgaatatgccagatgaattcaacacattgtacacagcaattatcacagatgatctcgatacggtactaaaaaaggatatcgagtcacttagaggtatcctacatgtgagagctcaatattgttataaaaatgggctgtaccaagaagcttttaaaatatatcaacatttagcaagtcacaatgagaaggatcaggatagtcaaattgaactctcttgtaacgaaagggttccgctatccgttgcgacagagttaatgaacagatcacccttagttactcctatggatgaatcttcctacgatttattattcaatgaatcattcatcatggcatccgtaggtaaatatgacaaggctatcgaactattagaaaaagcgcttcaaggagccacgaatgaaggctatcaaaacgatattaatactattaaattgcaattatcatttgttttgcaaatggtggggaaaactgcacaaagtaaagaaatcttaaagggcttattgcaggaactgaaagccgattctccattctctttaatttgtcaaaataacctaaatgcgtttgttgatttctctaaatacaatacaaacttcaatttactgttaagggaattaaacgtagaaaaactaaacacttttaatttacaaaccttcacccatgaacaatggtcaaacattcaacgcaatgtacttttcctgcgtttgttcaacaatgtcaaaattcactctcaagagtcccttttatcaagaacgttcgataaatactctaagttagttgacaatgttactttggaaagctacaagacgcaggccaagaaactttaccaccacactacaaaaaccattttaagtggaacagatggaagtacgattggaatattactactgactatccaattgctaataatagagaaggaatgggaaaatgctatcagaataggagaattatttttaaatgaaagctggaaatcgtcctttgaaaaattcaacgattcacaagccatcgtgtgttacattttatttgaattatacaagattaagggaagaaacaactccaaaagtgttctgcttaaaaaattaggctccgtgagagtccaattgagcggaaaaatccaagaaaacataccattttggaaacacgtcgggtttgaattattgtccatgggtaatgctaaagaatcgaaggctttactcagagagatttcaaactttagtaaaggcgatgcagatgtccttgttgacagagttgtttcgtcagattctttggatatagcacaaggtatagatctagtgagagatattgatattgataaattaattcaacttggtgtgaaacccttagaatcgtcagcaaagagaagtaaaaacaccgcagttagcaaagttcaaaagagaaaagttttagagctaaagaagaaaagaaagattaaacgcctcgaaaaatttttacaaggtcgcgacacctccaaattacctgatcctgaaaggtggctgccattaagagacaggtctacttataggccaaagaaaaaacaacaaggtgcaaaacaaactcaaggtggtgctatgaacaaaaaatcagaacaggcccttgacatatcaaagaaagggaagcccactgttaataaaaagcctaagaacaagaagaagggccgtaaatagagcgtataaagatttttgtcattagtaatcctcaaatgttgtcaagttatgtaatattgtatatga

SEQ ID NO: 3034 - DNA, 1116 bp, Saccharomyces cerevisiae
gttgatgttactagtgttattgataaataagaagtgtaagataacaacaaggacacgaggatggttgaaattgtgggccacagagcttttaaagcaagatatcctgaaaatacgctactagcatttgagaaggcttatgcagcaggtgctgatgtaatagaaacggatttacaaatgaccagcgatggtatggtggtggtaaaccatgactcagacactggtcggatgtgggataagaacttggtgattggcgagtcgacttgggaggaggttaagcgattgcgctgcaaagaggatggttccttagcaatgatgacattgaaggaaattctaacatgggcagtgtgccatccaggagctaaattgatgttggacatcaaatttaccaacgagaaaatcatcatgatcaagacctttgttatcatgttagaggttaagaatgatcttaaattttggcaggagaggatcacgtgggggctttggttgctggattggtacgatttcggtattgaaactggtgttctgaaggatttcaaagttattgtgataagtctgtctttagatatcgcctcgcaatttgtgaagcgctctttgacactgaatgatcctcactataaactttttggtatcagcgtccattttgtctcctcgtggacaagccaatttagattgagattactacctgtgcttatgaagaatgatatcaaggtctatttatggactgtcaacaaacctatagatttcaaatatctgtgcgaattgcctatccatggtgctatcacggatgatccgatcaaggcaagaaagttatgcgatggtcataccgtggcgaagaagcctactgctgaaaaaaagtttgttgcgcccagtctggcatctgtagatgggctaagattccatgcttttatcaaagtttataacatcctttgcacgcttctatattccaaatgggtccatattaagttgtgcggttggtctattgcttatgtgatttttttgttccttcgaaccattcattttctttgatatccattcattgacgtgaatattattctgaacactttctcttttacttctatatatatttatgttcgtatcaaaatcatgatattataa

SEQ ID NO: 3035 - DNA, 788 bp, Saccharomyces cerevisiae
cttaaaactatgaaaggaacaggtggagtagtagtcggaactcagaatcctgtaagggactacaatcatagcactgatgaagagtatcaaagattgagaagattagcagatgaagcgtataagaaaagagaccaactcagccatgaatcgcaaaccgcttatcaacaaggtgacaagaagctagctcatgaactaagcgagaaaagtaaggcacaactgaaaaccgctgaagattttaacatgcaagcggcagaatatgtgtttgtagagaacaatgctgattcttccagtaatgaaattgacttacatggattatacgtaaaagaggccctatttattctccaaaaaagaatcaaattcgctattgatcataatgaaccacaactgaacgttattgttggaaaagggttgcattctcaaaacggtatagcgaaactcaaaccgtcaattgaggagttctgtgctaagcatggtatcagaaaccatttggaaaaaggaaattcaggagtcttggtgcttgagttgcaaggtgtgcaaatgcagatggatggccccgcagtgaatgcccccactaatcagtacaatgcacaaccacatcctcaatataacaacaatggaggacagcctcaaggtcaagctcagaattataataacagtggcaatgacaacaaagatagtactttgactagtatattcaaaatcttttgtaattgtatacaaagtttggcgtgaggataaatagagaataatcctaagactgtattttttttatagtaataaatgcgaaa

SEQ ID NO: 3036 - DNA, 495 bp, Saccharomyces cerevisiae
gaaaatttaacatcctatttatttattgaatttacaggcacggaaggccaattagtttaattcagacacatatcatgagagcagtcactagaaacaaaatagtcaataacctatacttttctacatttctcattgcattcgcatcagtggccatcggttctgtgctgccatgtccagcacattcagtggattctgattcaccagctgtacagcaacacaagcttcagcttgctcatgagcaggagttaaagaggaaggatgctttaagtaaaaagatttaaacaggtacgggctatctggaacttttgataagttgtattctatctcttttatttcctctttttatttattttcgagtgccgtaatcttcgctacttcaagtttcataatcaatcgactttctgtatgggtaagcatctggtgtgatgcagtttcattatgacaccacaaatacaaaagagactatttaaatatgtatatagatcacattccaaa

SEQ ID NO: 3037 - DNA, 2122 bp, Saccharomyces cerevisiae
cactctttttttttttgaaaaaaaatatcatatttttctttgctaatactattttattttttcaattctggtcgttgaagccttttctattcagatatttcctaaagaaaaacaaagaactatcgttgtatttttttttttcttcaccatcacatactacttcaattgcattaaaacatggtggtttcttataacaataataataacaataacaataacaataacaataataatatcagtaataataataacaataataacatgttccctccttttccttcttccgatgactttgcaatgtatcaacagtccagttcttccggcccttaccaagaaacttatgcgagtggccctcaaaactttggcgatgctgtgtatcctatgaatggtaattttactcttttaccatccgactttacacgagagcctaatgattcgttcttttacgagaatgacggaatttttgattatcagcgtattcaacagcaaccaactcaattccagacaaagcagcgaaatgattcacaacagcaacggttttcacaggaacaaaatttcgaaattgataacgaagttgtccacaataacaatcgttattatgaatatgaaaggtcatcaaatgaagtctctccttttgatgatgagaatccaaatgtgttatctgatggcatgtcacccactattatggcaactgcaactgcagtaaccaacgcaaatgcgcctttaccagttaatgcacaagccaataatcctttgaattttacatcggccccaagtagaactgtttatttgggtaatgtgccaccaaacctaagcgttaaagagttattggatcatgtcagaagtggtgtcgttgaagacgtcaaaatcatacctgaaaagatgtgtgcattcgtttcgtttatagatgaaagtgctgcactattgttccattcagacgcaattttaaagcgcttgaacatcggtgacagggatatcaaaatcgggtgggggaaaccaactcgaattgatcctattgtagcggctagaatctctacggacggtgccacaagaaatgtatacattggccgtatgacgattgaaggcgaagaatcacatttatctgaggagcaattgagggttgatttagaagaatatggtgaaattgactgtataaaaattatcaaggaaaagggaatcgcctttattcattttgcgtctattttaaatgctataaaagtggttacgaatctgccaattagaaatccatactatcaaaataagagaatattttatggaaaggacagatgtgcatttattaccaaaactcaacaacataatgcggctcaatttctaggtgtacaacctggtatggaacatatgatagagttttctgatcgtgaatttatatctaacgctttgttacaacagtctgctgctgctgctgcaattgctacatctgcgggcggccccaataacttgggtaacaggactgtttacctgggcagcttgcctaaggatgttaaaattgaagaaatatgtaatgcagttcgtggaggtttattacaaagtataaaactattgaacgatcgatacgtctgttttgtaacattcattgatcctactgctgctgcgcagttttatgcaatgagttctttgtatggattcacagtccagaaaaaacgttgcaaagtcggctggggtaaacactccggcccattaccaaatgcgctcgccttggcagtcagtaatggtgcctcaagaaatgtttatgtgggtaatattgattttgtcggcgattccctaagagatgaacgtgtcttcaccgaaagcaacttaagacatatctttcagcaatatggggaagtggaacaaatcaatttcttgcctgagaagaactgttgtttcatcaattatactaacatcagtaatgctattttagccttagacaagattaagtctaacccctatttcaaagatctcaaaataaactttggcaaggatagatgtggtaacgtcccccaccaatcacgttaaacattatgtatatatgtatatgtatgtacgtagatgtttagtgtccgtctgtgtgtgtgtatccttgtatgtatgcagcaatctgcggtttacgtttagaagtctt

SEQ ID NO: 3038 - DNA, 3174 bp, Saccharomyces cerevisiae
attgaagttgctcattgaagaagaataagtgattaaaatgaaggacttgtctcattatggtcctgcgctatgtgttaaattttacaatgattatgttctagctggttatgggcctttcatccatgtctatgactatcattcggctacgttgattaacaaatgtaggctatttcactacaataaagttcatggacttagcctttctagtgaagggaaaattttggcctatggtgcaagatcagtaacaatagtggaacttgaagacgttttaaagaaagagtcattggtggatttcgaaaggattaactcagattggattaccggtgctacattcagctttgacaacttgcaaatatatttgttaacatgttataataaagtgctaatttgtgatttaaattgtgaagttctttttaggaagtctcttgggggagaaagatctattctatattccggtataattaaagttttcggtccggataaagtatatgttaacgctggtactgtaatgggcggtgttatcatttgggacctgttctcggagacaaaaattcataacttactgggtcatgaaggttctatcttttatgttaatttaagcaacaacggaagatatgttgccagttgctctgacgacagatcaattagactgtgggatttagaaactggcaagcagctgtctgttggctggagccatacggcaagaatatggaatttaatgttttttgataatgattcaaaactaataagtgtttctgaagattgcacatgccgtgtatggaacattatcgaatcacgagaaaacgttgccgaattatccatatctaacgtttacgaagtacatttaatcaagagtatatggggcgttgatgtgaaagacgacgaaatgatagctgtaacctccgggaatgatggtaggttaaagctgattgatcttcttcaactgaagagacacggcgatgaagaaacatcgttcagtctagatgatatcgcaaagcaatgtggcgatattttcgaaaagaatgaaagtatcaagggatttcaatggttttcattcggtgtaattgctatcacttcattgggtaaaatacttaaatacagtgatgtcacgaaacaatggaagttgttactaacaaatgaaaaattcaactcgtatccaattacaaatgggattcaaacgcaaaatatcgctgtcttttccaataataaaagtgacatccttcttatcaaatttagcaaagatagcgctgacataattgagaccgaagaattccatttagatgagctttctaagacaaataactgtctcgttacagaatacgatgatgactccttcctattgactttacaatccccaaatcctcgagagaagtttgtatgtttggaaataagccttcagaacttaaaaattaaaagcaagcactgtttcaataagccggaaaatttttcttcctcatgtttgacctccttccgaaatcatattttagtcggctcacgttttagtacattagtaatctacaacttacttgatgagagcgaggagcccttcataattaggagattaagtcccggagacactacaacctcaatcgaatttgtagaagataaagacaactctgcggtcttctcagtaacaaatagggatggctattatgtatttattgagttgacgaaaaacagtttggaagagggtccctaccgactaagttataaggtcttgcattctaataagatgatgaaaggtttcttggagggcgctttctttaattcaaaaggtgaatacattacttatgggttcaagtccagcttgttttatctctacaatgaaaccaactgttatgaactagctagtgaagtttgtggtggttcccatcgtctgtggaatctcgcaaaaattactgatggccacgtattaatgtatattaaggcatcccgatttcatttaaggaaaatttacaactccattgtgcctgaaactttagaaaatggtgtacacggaagggaaatcagagatatttcaatctgtcctgtttcaaataccaacacgaatgacaattttaaggatgggcatatattctgtactgcatctgaagatactacaattaagctgggatattttaacaatagaacagggaaggtgcagaatttttggacacaaagaaagcatgtgtctggattacaacgttgtcagtttataaatcacaaactaatgatatcatcttcagctagagaggagttattcttatgggaattgaacgataagtataataaacgaccatatatgaccatacgacaagctttacctgtatccacaaataattctgatctaaggatcatggattttgatgtcaaatttatatcacagtcaggtgacttcttattagttactgtttattcagattcaacaataaagatttggcactatagggaaaatcagaataagtttgacctgatcatgcaaggtcgttataagacgtgctgtttattcaacgtcgtatttattgcactgaaagaagagctccttgttgtcatttcaccaactgatggacatttagtggtttataatataaccgagtacgtaccattttccgttgatccgatttctggcgatttggttgaccacaaactggacgctactatctcaaatcttcccgcacctgtagcgcagttgccggtacatcaatctggtgtcaagtccctagactatgttgctaatgctacaagaacttccgccacaattttgacagggggtgatgataatggtttagggttaagcaacctgaaattagatgactcgaataaagtaacgttaaaaacaagtgactttatcgctgcagcagcttcttcgacaataacgtccggtatgttgattaatggtggcaaagaagtcattaccacatcggttgatcaagtaatacgcgcttgggaaattaccgcaggcaagctttcactggtagataaaaagcgtaccactgtggcggatacaggatcattagaaatcatttccaatgatgaagatgctgattctgagaaaacgttactgatcggaggtgttggtttatcaatttggaaaaaatgatacaaaaaattaacatatacataaaagaatattatagatatgtattatttacagattttagaaaatgagaatattttgtaaacacccgaacggag

SEQ ID NO: 3039 - DNA, 1413 bp, Saccharomyces cerevisiae
ttcagatttctttctgtgggaacgggtcatttctgccatcttacgtctctcagcttttctcttttgttgaaccttaatttattcatgtacatcaagctgtagtttgtttttttcttttggtaattaatttttgtccttttgttttcttacagcgtgtatatattaatgattaattttctatgactgatttcgtcgcgcccggcgttttcttgtctcttaatgcctcctgtttctgttaattggtaagattatgttaaattggtcaagatatatactaatacaattttttagttgatcttcccacccttgttttcaagcgataccacgcctatccagtgctactgatcgctacttgccgagcccctacttttatgctaacaaccttcgagaatagttacattcgaagatgaattataactgcgaaatacaaaacaggaacagtaagaatgttgacaatcaagtcagtctaccccctatccaagttctatttaactccatagaaaaacggagtatgcccgagttggcattttcgaacatagaatactcgcatgggaaccttcggtctagtaccgaggaacaaaactatcctgcgcctgtgttacttccacagcatcattcgattgcgtatcccgcaattaattctggcggtactagtactactgctactcctactgcttctacagttgaaacgtccaagacgagtagcagtgctatggatacacaatctcaatatggcagttcaaagaagtcaaaatcggcgtccgatgatgcaaagccctgctacaaatccgccccaatatatgaaataatcaataaggaaaaggatgcgggggcacaatacaacaggccattttcggattttgtagaatctaaatcaaggaggaagcaaaattcgggcaggaggtctaacctgccaaaggaaacagtgcagatactgaatacttggttgctgaaccacctgaataacccctacccaactcaacaagaaaagagggagttgttaatcaaaactgggctaaccaagattcaactttctaattggttcataaatgtgagaagacgcaaaatatttagtgattactataccctggtaaactcaattcctaatgacaacgcgaataataccccagtggaacgagttcaaaacgtctcagcatatcataacacattatctgccacaaataatactatgtacgatgctacgtcaacctgctccacggattatgaattatccaagagatttgctcatgcccccgttacacgccgtaaaaaactaattgataggctggaagaattgaaaaagctatccaaccctgatatgaattgatcacttatcaatgcattacttaaatattcatataattatatctattaccatttacattttatcgttactatatatagtattatcat

SEQ ID NO: 3040 - DNA, 2485 bp, Saccharomyces cerevisiae
tgagtatacaaaggatatggtgaatactaggggctacactactcttccgaatgttgaagaaccagcaaataactcacaagatgagctaaactcgcaggactttgagcaagctataggaatgccatcagaacccccggtatatgtggaagagatggggatggaagaaccgcaggctccggaagcctttagtgagaaagtccagcgatttcgtatgtgttttgaaaataacgtggtgattccagtaaagaaaaatgtagtggatccgctagcacaaatgatttccctggcctctgagaaattcgatttgttcttaagtaaaataggtaatgttatggtaatgaggagaatattttacatcatgatgatgtctatcattgcagcgttgattattgcgagtgataggttaccgaatggaaaagctcgaggttcaaatggatcattctcggaccatgatctccttttacagtatgctcggaaatcgatagacctttcaaagatagaaagagatttagagtatattagtagtatgccccacatgtcaggaacaagtggtgatgccgctattagacattatattaaagagtcgttcgacaaaaatggtataaggctagctggggaagaggagttcatggcgtattcgaattacccaggaaatgtctcacttcgtgtatattcaaaggatgatacagaagggtttgatattcccttaaatgaggagaactttaacccaatgagccataatggtcaattgaacaacataccggtgatttatgctaataaagcatcgttggacgatatggcttctatgcaagatcaagggcttttaaacggtgactttattttactagtgcattacggagattatgttttccaacaaatgttgactgctcaagaatatggtgcgaaagcaattatctttatttctgagccttatcaagacaacaaagacgtgatacaaatgaagtcagttgcgttgccgcagtatggtactggtgatgcacttacgcctgaatgggaaggatcaataagagatcctatcgatgctacggaagccaagtgcctacccaaaattccatccataccgatatctgccaatcaaggagataaaatactagctatattatcagacactggcgtaaagttttctaataatttattcagtgggtcgcttaacgattgtcgacttgacctactagtgcaaacagcaattagggaacgccacccggttcacgatatagttggtaaaattgaaggatcggaacaagcgggcagggcaattgttattgctgcaccgaggaactctgctagttatggcactatgtatccttcttttggaaccgtcgttttgctgtctctgatccaattatatcaagaaatggtttacaaatttgactggaagcctctaagaaatatatatttcatttcctttgggggctctgaatttaatgaagcgggagccacggagctgatggaaaagagaacagaggcattgaagagtgaaatatacaccattatcgacgtcggccaaatcggtatatgggatgatagtaacaatttagagatacaatgtcatccgctactagtagatctttttcaaaaaaacatgacaagccgtaaatttaacgttaaagtggataatgttcaccagttcggcgactggacgccgtatctagcgcaagggattccagttgcgatcatttcatctccaggagtcatgaatagagaacatccgatctacacagtagaagacaaattcgatttcatcaaagataaactaagagacaaaaagaagggagaggtactttctgagataatgctatatcttgtcgaaaaatcactcgagctcattgacgatccattcatcccattcagcatatcgaactacgtagatttcctttcaactacgttaaaagacctccaaaaagaatgtcctgatacggtaaactttgacgaagtctttttgggcacaacattgtgggaaaacactaaactgcagttcgaaaaatggaaaagcgaatggacagagcttatgtatggagccggtacatatatagaacccactatcattgccattaatcgttggtcatggaactacctactttccctaataggcgttacccaatgtttggaggaagggttaatggatagaaccttttacaagaacgttatcttcgggccaaaactctgggtcgacaaaggtgacccacttcgttcatggacgttccctgaaatcagggacactattgcaatcaaggactggagctctgtgcaggttcaagctaacacactcggcacaattttacaaaatacagcacgctattttcttgagaataaaaaccttcatggaataaacacgaacgaattttagttatcggttgaaagaaaattacacatcgatttatgcaggcaatcaactatagtatacacaacatatactcctatgacttgtagatttcttgcctaggaagactaaatacgtttaatt

SEQ ID NO: 3041 - DNA, 1539 bp, Saccharomyces cerevisiae
ctctttttttcgatttctccttttttcctctttagatgagttactttcctcgaacatatgctcacttgatgagaaatgttcttgctcataataaagggaatatatacttacaaattggtacacagctgcacgatactcaaataaaaattcgatttaatggagttcgttatattagtcggaatcatggcgggaaacagcaacatataaacactgcgccgatagaatttactcccaattttggatatggtgatagaacctctaattgcaataaaaaggttgaatcgactgccatgaaaacgctaagatgcacagatgatatatcaacttcaagtggaagcgaagctactaccgatgcaagcacacaacttccatttaatgtcaaacttgtagacccgatggtaagaaaatctaagagaccatctcacgcaatcagcgaagggctgaatatgaaaactttaaagaagaaggtaattatgccatatcttcagttgaccaagccccgactcaccattctagtgatgttaagtgccatttgttcgtatgctttatctccatatccagcctccgtcaatgaattgttatgtttaacagtaggcactactttgtgttccggttctgcaaacgctataaatatgggcagagagccagaatttgatagacaaatggtgagaactcaggcgaggcccgttgttagaggtgatgttacacctacccaggcattcgagtttgccgcacttatcggaacattaggagtatctatcttgtactttggtgttaatcctaccgttgctattcttggtgcttcaaatatcgcgttatatggctgggcctatacgtctatgaaaagaaagcatatcattaacacatggttaggtgccctagtaggaatggtacctcctctaatgggatgggcagccgcaagtccgctttcacatccgggatcttggtgccttgctggtctattgtttgcttggcaattcccacactttaatacgttgagtcataacattagaaatgaatacaaaaatgccggatacgttatgactgcatggaaaaatccgctcctaaacgcccgtgtgtcgttgagatactctatcctaatgttccctttatgtttcggattgtcttattttaatatcacagattggtactaccaaatagattccggacttataaatgcctggctaacgttctgggctttcaaattctattggcaacaaagaatcaactattctgcaaaaacattaaaagataacgtcaagtttaataaaggtctaagtgtagccaacatttatgcaaggaaaacttttatggctagtgtattgcacctaccggcaattctaatcctagccattatacataaaaaaggccgctgggattggatatatcctggtgaagcaaagcgaccacaggaacgattttagcattagtacaatgagataaagagacaacgcttaaagggcagtcattaatcttgtaaataaatatttaaacccttttattggttaaaaataatgtacatacgcacataatttattt

SEQ ID NO: 3042 - DNA, 2077 bp, Saccharomyces cerevisiae
tcgttaaaaattctgcatcgctaatagcagcaaaaaaaatgagcggatttcacaatgttggaaatatcaatatgatggctcaacagcagatgcaacaaaatagaataaagattagcgtgaggaactggcagaatgcaaccatgaacgatttgattaattttataagccgcaacgctcgagtagctgtttatgacgctcatgtggaaggacctttagttattggatatgtcaactcaaaggcagaagcagaatcgttaatgaaatggaacggtgtccggtttgcaggcagtaatttaaagttcgaacttttagataacaatggggcctctgcgggaacttcagacaccatttcgttcttgaggggggtgctccttaagaggtatgacccacaaacaaaattactaaatttgggcgctttacattcagatcccgagctaattcaaaagggcgtctttagttccatctccacccagtctaagatgtttccagcaatgatgaaactggcttctacagaaaaaagtttgatagtggaaagtgtcaatcttgctgacaaccaacttaaggacatctcagcaatttccacattggctcaaacatttcctaatttgaaaaacctctgtctggccaacaatcagatttttagatttagatcgctagaagtttggaagaacaaattcaaagatctaagagagcttttgatgacaaataacccgataaccaccgataagttgtatcgcactgaaatgttaagattatttccgaaattggttgtactagataacgtgattgtgagagacgaacaaaaattgcaaaccgtttactcattaccgatgaagattcaacagttttttttcgaaaacgatgcattagggcaatcatctacagactttgcaactaactttttgaatctatgggataataatagagaacaactgttaaatttgtattcgccccaatcccagttttctgtttccgtggattctactattcctccatctacggtaacagattcggaccaaactccagcatttggttattacatgtcgtcctcacgtaatatatccaaagtgtccagtgaaaaatctatccagcagagattgtcaatcgggcaagagtccattaatagtatattcaagactttgccgaaaacaaagcaccatttacaagaacaacccaatgaatactcaatggaaacaattagttatcctcaaataaatgggttcgttattacgttgcacggattttttgaagagactggcaagcctgaactggaatccaataaaaaaacggggaaaaataactatcaaaagaatagaagatacaatcatggttacaactccacatcaaataataagttatccaaaaaatcctttgatagaacctgggtaattgttccaatgaataatagtgtcataatcgcatctgatctgttaactgtaagagcgtattccacaggcgcttggaaaactgcatctattgcaatagcacagcctccacagcaacaggcctcggtcctaccacaggtcgcaagcatgaacccaaatataacgacaccaccgcagccacaaccttcagtggtaccaggagggatgagcattcccggcgcaccccaaggagccatggtcatggctcccactttgcaactacctccagatgtccagtcgcggctaaatcccgtacaactcgagctgctgaataaactacatttggaaacgaaattgaatgcagaatacacgtttatgttggccgagcaaagtaactggaactatgaagttgccataaagggttttcagagtagcatgaatggcatccctagagaagcatttgtgcagttctaatgatattgttccctgtttcagccgcacagtatcacaaaaaatatacagtttaagctactgttttcgtcacgttccgaacagcagcatgctttgtatattttgtactaattcataaataagtaattatttctatacaaccgttatatagaagattttttcaaaatatagatatgtatatgtatacatatatcatcgtccaccacgccccttcctttttccctttccttggtgtttgctat

SEQ ID NO: 3043 - DNA, 1089 bp, Saccharomyces cerevisiae
catctagtctctttcttgtacactagttgtctaacacaaccaacaaattagaatatatatcgcaatgattttcaaaatattgtgtagtttactactggtaacctccaacttcgcttctgccttatatgtcaatgaaactacgagctatacaccatacacgaagacattaactccaacatactctgtttcacctcaagagacaacattaacgtacagcgatgaaacaaccaccttctacataacatctactttttactctacctactggttcactacctcccaatcagctgctattattagtacacctactgcaagtacacctactgcaagcacgcctagcctaactacgtccacaaatgaatacaccaccacctattctgacacagacaccacctacacgtctactctgacctctacttacataataactctatctacggaatccgccaacgagaaggctgaacagatttccacgagcgtcacagaaattgcttctacagtaaccgaatcgggcagtacatacacctctactttgacctcaaccttattggttactgtatataattcccaagctagtaatacaatagcgacatccacagctggggacgccgcctccaatgttgatgccttagaaaagttagtctctgctgaacatcaatctcagatgattcaaaccacatccgccgatgaacagtactgtagtgcgtctaccaagtatgttacagttacagctgctgcagttaccgaagtggttactactacggcggagcctgttgttaaatacgttactataactgccgatgctagtaatgttacaggttctgctaacaacggtacccacatttaatgcgtgacgttgaatcgagaaaaaaagctacttttaacgaaacctttactagttatcctatatgggatcactagtattttttgatttacgattcaataaatagactagagacaactttcatatcattccttaaaaaatacataaagcgcaaattcaaccccattgatacatatataagtagttctattatgactttcaagaacaatagtagcttttctaaataatcaataagtagcacaaaa

SEQ ID NO: 3044 - DNA, 971 bp, Saccharomyces cerevisiae
cttgaatgtactaagcagaaaaagttctaatacatattagcaggaggcccaacagtcacacaagttcagcagaactgccaattaatcgaaaagaatatgtatgtttctaatgggaaagacacttgccagttgttggggcccgtgtctctttttgtccagacattgatgggtatgacagccgtgattgtgttattggtgaaaagaaactatgagcatccaaggagaaaaatgattgtgtggagttatgacattggaaaacaaatcatcggctctcttggaatccattttttgaatctaggcatcagcatactgaagaaaagacgaaggtcactcttcgcaatcactgcaaaaggcaatgatgatgaggatcaatgcgattggtattttcttaacttactcctggatactactgttgggattcccattctttggttgtgcttatacataattgaaaaagtgctaaaatccttacacttccaaaacattgaaagtggtaattattttccatctaaaaccgttgggagccaccccagaaaacccttattctctgccttcgtgaaacagctgcttatattcattgttgggctgggcgtgatgaagttctgcgtgtttctaatactaaactacttagaagacttggcatactggttcgccgatcttatccttggctggtcagattcatggccaaactttcaagtttttctggtcatgtttgtctttcctatcttactgaattgcttccagtacttttgtgtcgacaatgtcatcaggttacattctgagagcctaacgataaccaatgcagagaattttgaaacgaacacattcctaaatgacgaaattcctgatttatcggaagtctcaaatgaagtgcctaacaaggataacaacatttccagctatggtagcataatatagtattccaaggataaggaaagcatgcactgtttatttcctttccttgcttaatt

SEQ ID NO: 3045 - DNA, 1536 bp, Saccharomyces cerevisiae
tcgctgctatttattcattccaccttcttcttttttgagcgaagcctttataatcaaattttagtggtcttttctatttttatttgagaagcctaccacgtaagggaagaataacaaaaagtatatctcaccctactgtattcataaaaagttttttctattagaattctataagaaaagaaaaaaaaaaagcctagtgacctagtatttaatccaaataaaattcaaacaaaaaccaaaactaacatgttcagcttgaaagcattattgccattggccttgttgttggtcagcgccaaccaagttgctgcaaaagtccacaaggctaaaatttataaacacgagttgtccgatgagatgaaagaagtcactttcgagcaacatttagctcatttaggccaaaagtacttgactcaatttgagaaagctaaccccgaagttgttttttctagggagcatcctttcttcactgaaggtggtcacgatgttccattgacaaattacttgaacgcacaatattacactgacattactttgggtactccacctcaaaacttcaaggttattttggatactggttcttcaaacctttgggttccaagtaacgaatgtggttccttggcttgtttcctacattctaaatacgatcatgaagcttcatcaagctacaaagctaatggtactgaatttgccattcaatatggtactggttctttggaaggttacatttctcaagacactttgtccatcggggatttgaccattccaaaacaagacttcgctgaggctaccagcgagccgggcttaacatttgcatttggcaagttcgatggtattttgggtttgggttacgataccatttctgttgataaggtggtccctccattttacaacgccattcaacaagatttgttggacgaaaagagatttgccttttatttgggagacacttcaaaggatactgaaaatggcggtgaagccacctttggtggtattgacgagtctaagttcaagggcgatatcacttggttacctgttcgtcgtaaggcttactgggaagtcaagtttgaaggtatcggtttaggcgacgagtacgccgaattggagagccatggtgccgccatcgatactggtacttctttgattaccttgccatcaggattagctgaaatgattaatgctgaaattggggccaagaagggttggaccggtcaatatactctagactgtaacaccagagacaatctacctgatctaattttcaacttcaatggctacaacttcactattgggccatacgattacacgcttgaagtttcaggctcctgtatctctgcaattacaccaatggatttcccagaacctgttggcccactggccatcgttggtgatgccttcttgcgtaaatactattctatttacgatttgggcaacaatgcggttggtttggccaaagcaatttgagctaaacttttcttacttctccgccctatccttttctgccatctagagagcttttataagtagataacaata

SEQ ID NO: 3046 - DNA, 804 bp, Saccharomyces cerevisiae
acttttgatagaaaagctagttctttaagaaggctgaatagaagctaagcactattttcttatcaggagtattgctttctaatgaacgtttatttcataagtgctagctttgaatgcctccagtgatgagttttgcatcgaggaatattggacgtaagatagcaggagtgggagttgacattgtatacttgccaagatttgcacatatactagagaaatattccccattcgacccatgtggccgttctaccttgaataaaataacacggaagttcatgcatgaaaaggaaagatttcatttcagtaatcttctcatcgaagaaaactgcttaactccacgattgcatgaatatatagcgggagtttgggctttgaaggaatgctcattgaaagcgttgtgttgctgtgtttcaaagcatgatctacctcctgcccaagtactgtacgctggaatgctatataaaacacaaaccgatacaggtgtacctcagttagagtttgataagatgtttggaaaaaagtatccaaagtatcaacagctctcgaaaaactacgattctctcttttccactcatgagtttttagtttcgctatcccatgataaagattatttaattgcagtaacaaacttggtagaaagagagtaaaagttttcttgcagccgtataaatgtggccctattttcaacgtccaagttattttctgcgatatttgaatgacacttttaaatgcgtatataacagctcttagagctcagaggaagctttatcgccgccttttataggaacaagagttatgtacaaa

SEQ ID NO: 3047 - DNA, 1997 bp, Saccharomyces cerevisiae
cttaagtaaacttttctttgagtttgactctatcacattggctttttttttacccaatttctagctgttgtactaaagaaaaaaacaaagaaagaaaactatacattggatagaaactggctatttgttcacgctttcaacgaaatcaccagtctgaacataacagaaatatatcaaacttttctcctagaaacaaatcgaaaaatttataagatttagtctcaagaatttcaagtcatgtctcaatacgcaagctcatcctcatggacttctttcttgaagtcaatcgcttcattcaatggtgatctttcttcgttatcggctcctccattcattttatctccaatctcattgaccgagttttctcagtactgggctgaacatccagagctattcttggaaccctcttttatcaatgacgataattacaaagaacactgtttaattgaccctgaagtcgagtcacccgaattggcccgtatgctggccgttactaaatggttcatttccactttaaaatctcaatactgttctcgtaatgaatccttaggttctgagaaaaaacctttgaacccatttctaggtgagttgttcgttggtaaatgggaaaataaagagcatcctgaatttggagaaacggttttgttaagtgagcaagtttctcaccatccacccgtcactgctttttccatcttcaatgataagaacaaggttaagctgcaaggctacaaccaaattaaagccagtttcactaaatccttaatgctgactgttaaacaatttggtcacactatgttggatattaaggatgagagttatttggttaccccacctccattgcatattgaaggtattcttgtcgcttctccctttgttgaattggaaggaaaatcatatatccaatcttcgacaggtctactttgtgttattgaattttcaggtagaggctacttttctggtaaaaagaattcattcaaggcaagaatttacaaagactctaaagatagcaaggacaaggaaaaggcattatacacaatatcaggccaatggtctggctcttctaaaataatcaaggcaaataagaaagaagaatcacgattattttacgatgctgctagaatccctgctgaacatctgaatgtcaagcctttggaggagcaacacccactggaaagtagaaaagcctggtacgacgtggctggtgccatcaaattaggcgattttaacttaattgccaaaacgaaaactgaattggaagaaacgcaaagagaattgagaaaagaggaagaagctaaaggcattagctggcaaagaagatggttcaaagattttgactactctgtcacgcccgaagaaggcgcccttgtacctgaaaaggatgacactttcttaaaactcgcctctgctctaaatttatcaacgaagaatgctccaagtggtactttggtgggtgacaaagaagacaggaaggaggatctttcatccattcattggagattccaaagagagttgtgggacgaagaaaaggaaattgttttgtaaggagaacgataaagtaacaacttgttaccgttgcactaatatattatctatcttttcttctttttccttcctttttctcttcatgtgacaggaaaggatatgaaatcattagaggaactaagaaatcatttttaccatcccctaaatcttatattgttttgttctcttttcactataatgactagaatttattctttcgaaccacaagaatatgctatattgctgttaaagatgaagcagaaaaaacctttatctatttctacttcttcctttaattattgatagacagatcgctcatttttttctcatgatgtcatatcctttttaatcatcatacgaaggttaaaatttgaagtttaccaagttttcatgcaagttttgttattatttacaacctattactatattttatcttctctgttgatatcctcacttttgtcttttttataactctc

SEQ ID NO: 3048 - DNA, 3911 bp, Saccharomyces cerevisiae
atgataactaacaccgagttcgatgtgcccgtagattggttgtataaaggtaagagtagacggaagacaaatacgaagccatcgaggccttctacgtcgccagcctcctcttcatctacgtcctcttcgaaaaacggagacaatagcacgagtggtaacaggtctagcaatgataagcctcgtgcgaggtcgtcatctgtatccaatgcagcactttgtaatactgagaaaccagatttgaagaggaacgatggtaatacctctgcatcagacactgataacataccgctacttactcctattaatagcggtaaccggagcgattccgctgacattgataatccggctaccgtagacgccatagaccttatagataatgatgacaacggctcaagtactcaatttgtaaggaaaaaacgttccacttctatatccaatgctgtggtctcgtccaaaccaagactggccagttctgccataaacgccaccgcatcttcttctgttggcaagggaaagcacccgccaatttcttcaccatctaatgctactctcaagagaagcaactcgactagtggagaaaagactaaaaggtcgatttttggatctttgtttagcaaacggtctacctcttcttcagcttccactgccaagaaaccattacctgttgttaatactagcacgactgagaatgagtctggtggcattaaagcagttgcgactcctgatccacgggtgaaggagatatcatcaccaatgagaggagtggcaccaacagctagcaagccacagacacctatactcccctcccctgcacttgcagtaaaagacctatctacagtttcattgaaaagggtctcgtttgccgtcgataaattcgaatccgatcctccccaacaacttccttcaagaaccccaaaaaagggaaacatccttatccctgatgacatgataagcgaggttccttctatttccgtgggtatttccagtagcaaccaatcggccaagtcaaccaattccaacattaagggaccgttgtacactaagaagtctaaagaatatatactcgccctggaaaatcaaaagttggctttaagggaggctgctaagcatcagcaagaagctcattttgctgctaatagaatagcctttgaagtagccaattttaagactgcttcggatgcaggcggtaagcttactgaaaagtcatcagaaggcaccattacgaagcaaagagaagaggtgtcacctccaaatgttgaagctgatcgggagcttgagaataataaacttgcagaaaacctctcaaaagccggcattgataagcccattcatatgcatgagcactatttcaaggaacctgatcaagataagtaccaagacggtcattctattgaaaataacgaagttacgctggatgttatttacacaagatgctgccatttaagggaaattttacccattccgtctaccctaagacaagtaaaggacaagacagctcccttgcaaatattgaagtttttgaaccctaagcctaccttgatcgatattctttccttttgtgatttcatcaccattgctcccattcacacgattgttttcgacaatgtagctttaaaccaggatatgttcagaataattatttctgctttggtaaactccacagttttggacaaattgagtttaagaaatgtacgaatcgaccaagatggatggaaattactatgtaagttccttttgctaaacaaatcactgaacaagctcgacatttcccaaacgaaaatcaaatctgaccttgctgaatcactatatcgccataacatggattggaacttgtttactgacgtcttgtctcagagatctcacaaacctatagaagaattgttattcaatggtattcaatttagcaaaattccttactcatgctttgcacgtttactgacatcctttgctacccaaaaaaactttccagaatcgggcatcaggcttggtttagcaggtgccactacttccaatatctctcaggattgtctgaaatttatcttcaattggatgtctcaatataacgtccagggtgtggatctagcgtttaatgatctgtccactatgattaagccaatggttggtaaactatctgctctatcatatgataacttaagatatttcattttgaacagcactaatatttcgacttcttatgatttagctttgctcttgaaatatctttctaagttgcctaacttgatttttttggatttgagtaatttgtcgcaatgctttcctgacattttaccctacatgtacaagtatttaccaagatttccgaacctgaagaggatacatttggatagcaataatttgacattaaaggaactagctgtcgtttgtaatattttgattaagtgcaaatcgctctcgcatgtgtcaatgactaatcaaaacgttgaaaacttctatctaatgaacggcacagattctcccgttcaacaaactaacacagacggcgacttggatagttcgagcacattggacgttaagggccaatttgctaaaaatagtttttcatccacactttacgcatttgctagagactctccaaacttgattggtttagattttgactatgatttgatatcagaagagattcaatcaagaatagcactgtgcttgatgagaaatatgaaacggaccatggattcgactttccagttagatgaattggattcgcaagatgatttgctattcgatggctctttagtaactatgaccgctgaaagtgttttagaaaaactgaacttgttaagcgataagagtacaaaggtcaaaaaagacaccacgaagagatatttgctgaaaaaatatattgaaaagttccatatcttgcaccataatgttcagcatacaatagatactatgttcgaaaaaaggaaatcaggtgaattgccattgcaagaaaaagaaaaccttgtaagattactccttttggaacaaaacttatgcaatatactagaattgttttcgcataatccgaatctgaatgatgtccttggatccagcagggatgattcgaaggaaagtgttgactccagcgaagattcaaaattaccagcattgaagcacgttgaatccggataccatgttcccgaagaaaaaatacaacctgagaatgatgtaattacagcaagaccacatttaatggccaccgattctggtaaaactattgacgttttcacaggcaaaccattggtgttcaagcatacatcatctagtacttctgtaggttgtaaaaagcaggaagaagaagaaggtgaactacataaatggggtttcttcgttcagcagcagaggtctttataccctgaaaatgaatcaacaaggcagacaccttttgcatcaggtgatacgcctatcaacacagaaacagctggtaagtcaacttcatctccttcagtttcaacttctaacaatgaaactgctaccactagtttatttagcccagctaatcctaagattttaccaaaaattccatccggtgctgtcttaagatcggcaatcatgaaggctaaaggtattgattctatcgatgatttgattcagaacgttaactccaacaacatagaattggagaacatttatggtgaatccattcagaatagcgcttcgacatttacaccaggcgtggattctgatgtatctgcgcccaataccgataaaggatccgtagaaacattgcctgcagtctcaactgacgacccaaattgtgaagtcaaagtcactgctacctatgacaaactattaaataatttgtcgatggagaggtcaatcagactttgaagatacatgaatccttctcttcactgatggatccattttcttcttcctttttttcactgcataaaactttttttatcaac

SEQ ID NO: 3049 - DNA, 1229 bp, Saccharomyces cerevisiae
gaaaaagaactgtaagatgacatctatagataatagacctttgccgttcatataccagttcacagccggtgccattgccggcgtctcggagctattggtgatgtatccattggacgtggtgaagacaagaatgcaattacaagtgacaaccaaaggtcatcccgctgttgttgcagcgaaagcagcagtagatcactacacgggcgtgatggattgtcttacaaaaattgtgaagaaggaaggattttcgcatctttacaagggtatcacatcgcctatattaatggaggctccgaaaagagcaattaagttctccggaaacgatacattccaaacgttttataaaaagattttccccacgcccaatggggagatgactcaaaaaatcgccatatacagtggtgcgtccgctggcgccgtggaagcctttgtcgtcgcgccttttgaactagtgaagattagattacaggatgtgaattcacagttcaagacacccattgaagttgtaaagaatagtgttgtgaaaggtggtgttttgtcacttttcaatgggttggaagccactatctggagacacgttctttggaatgccggttatttcggtataatattccaaattcggaagcttttgccggcggctaaaacaagcacggaaaagaccagaaatgatttgatcgcaggtgctattggtggcactgtcgggtgcttgttgaatacaccatttgacgtggtaaaatctaggatccaaagaagttccgggccgctgaggaagtacaactggtccctgccttcagtgctgttagtttaccgtgaggaagggtttaaagcattgtataagggatttgcgccaaaggtcatgagacttgcccccggtggtgggttattgttggtagttttcacgaacgtcatggattttttcagagaagtcaagtatggtaaaaaacaatgatcctgacgctttttatttcattttgttgtagcccgcccatacatgtatacgtatatatatatatatatttattggaagtaaaagtaaaaaactcgcttacctagcacatgtttaaacaagcgttgaaatgaaggaaataatgaaagtctagttttgtctagcgataaatagtgttaattaaaacagccttttacaactaaagaatatttatataataatgatgccatataccacacatgggaaaacaaatatataagggggaagtgggaggatgaaaaaa

SEQ ID NO: 3050 - DNA, 1410 bp, Saccharomyces cerevisiae
ttttaattttaatcaacacaaaatacacatatttatataaactgacgaaataatgtcagcaaacagtggtgtaaaacgagccagtaaggcttttaaaacatgtttattttgtaaacggtcacatgttgtatgtgataagcaacgtccatgttctaggtgcgtcaagagggatattgcccatttatgcagggaagatgatattgcggttccaaatgagatgccatcacagcacgaaagttctccgaatgataataatatacagggcaaatatgcaaataaagcacacactggaattccgtctgactatcagaatgaaccagtcaataaaagtggatccacatatggagaggaactgtcaccgaaactagactcctctcttgtaaatgatacaaccagcttgctgcttccgcaacaacctgtatttgtgtccgagaatgttggttcggaattcagttctttgaatgaatttctttctatgctagaaaatcctctattgactcaaacatcactaagttccagcagtgcgagcaatgttcatttggaaaatggctcacaaaccacacaatcgccattagagtaccaaaacgacaatcgtagggatgaaataggagtggcaagacaagaaaataggtcgcctactattatgtcaggttcttccaatagtatctcgaaaggggataaacaagatcaagaaaaggaagagtctcgaattctagcgaatgcaaacgaaaacagtgcaccgacaccgaaggaacaattctttttaacagcggcggatccgtcaacagagatgacaccagaacaccggctgaagttggtcataaatgcgaagcttgaagcaggattattgaagccgtataattatgccaaggggtatgcaagactacaagactacatggacaaatatatgaatcagtcttccaagcaaaggattctgaaaccactatccaccattagaccggcgtttagaaccattgcgcgttcattgaaggatgttgacttagttttagtggaggagagcttcgagaggatgttattatcttatgatcgtgttttcacctctatgagcatgccagcgtgcttgtgtaggcgtaccggtgagatttacagagccaataaagagtttgcttcactggttgactgcacagtcgatgatttacgcgatggaaagcttgcgatctacgagttgatgacagaagaaagcgctgtgaatttctgggaaaaatacgggtccatagcgtttgataagggtcagaaggctgttttaacaagttgtagtcttcgaaccaaagatggaatccgcaaacggccatgctgttttagtttcactatcagaagggataggtacaacatcccaatttgcatcgtcgggaatttcatccctttgtcataagcataagtaatacatag

SEQ ID NO: 3051 - DNA, 1689 bp, Saccharomyces cerevisiae
atggattcgcaagtgcccaataataacgaaagcttaaaccgcttcaatgacatcatccaaagcctgcctgcaagaactaggttgaccatatgctcattatgtctgctggacaatatctccactcaactactgaggtttcttatccttaatgccaactctcccaatattatagcggttttgacggaccagacggctttcctaagctcaggcgaaacagaaatttttcaaacgttagtcaagctctttaagcagatcagaatgatttaccacaccagatctccgttactgtctgttcacgacgtggcgcctggtttatggtttcccaactcccctcccccccttatattgagaggccacgaagcgtttattattactgccataagaaaggcgaatctgctaacatttctattgacgtcgctgaactgccttaattacgggtttgagctgctacagtcgatatttctcgatattttctgtccaaatacaaacactgtcggtaacaactccctggaacaaagcggaaagtttttgaaatcgcaggctatcctatatcttgatctgaaaacacaggcttacattgccggcttgaaagagtttcaggacgagacgaacgaaatttctttagaaaagaaacaagagctactagacttaatcttcccatccaatctggctgatattctcgtgcagagaagaaccggcgattctggagacattacacttttgactccatcggagaaggacttcgtcgaaaggtgcgatcgtcggagagaaaatttaaagatcgtccaagattttaactctctgacccagagctacgaatgggctcaatttatcagagagttgctggattattgtaataaaaatatgggtctcatcatatggggcagaaagggtcgcggaaaatcaccattatatgactttgatgtcaacgagtttgatcctcaagtactcttttctacagggaccaggaccgtagaattcatggacgaccaaaatcagccaagcagtgcgtctgcttttttgtcaactgctcgtccgaatcattacagcacacatacacctaccacagatgtgtcttccaaaaaccccgctatcacacaatccattgtggatgccgctgttgcggcctcgatgagcaacagcagctctggtcctcattcctctcataacaacagcagtaacagcaacaataatggtagtatcggattaagaaaaccaaaggcgaaaagaacttggtccaaagaggaagaagaagcattagtggaaggcctgaaagaggttggcccatcgtggtctaagattctagatttatatggtcccggtggtaaaatcacggaaaatttgaagaacaggacgcaggtacaactgaaagataaagcccgtaattggaaattacaatacttgaagagtggcaaaccattgcctgactatttgataaaagtgaccggtaacttggagaaaatctacaaggcaaagaaaaaattctctcaatctccaaattcgtcaactattatggaacaaaatttatctcagcatccttcatcagctgcatctgctactgaagacactcaaactcatcaagaggattcacatgggcaaaatagtgataatatgccatctaacggactttttggcaatagtacatcggacaatacaggttttgatcctcatttagaagatgggatgtag

SEQ ID NO: 3052 - DNA, 1123 bp, Saccharomyces cerevisiae
gcgagggaagcaattataatacaactaaagcaacatggcacccaagaaatccactaccaagaccacaagtaagggcaagaagcctgcaaccagcaaaggcaaggagaaatcaacttccaaggccgctatcaagaaaaccacggcaaaaaaggaggaagcttcctccaagagttacagggagttgatcattgaagggctcacggctttgaaggaacgtaagggatccagtcgtccggcactcaagaagtttatcaaggaaaactacccgatcgtcggatccgcaagcaactttgatttgtacttcaacaatgccataaagaagggtgtggaggccggcgattttgaacagccaaagggacccgctggtgctgtgaaactggccaagaagaaatctccagaagtaaagaaagaaaaagaggtcagtccaaaacccaagcaagccgccacttctgtgagtgcaaccgcatcaaaagcgaaagccgcatccacgaagctagcgccaaagaaagtagtgaaaaaaaaatcgcctactgttaccgccaagaaggcctcttcgccttcttcattgacctacaaggaaatgatccttaaaagcatgcctcaacttaatgacggtaagggctccagccgtatcgttttaaagaagtatgtcaaggacactttctcctccaagttgaaaacaagctcaaattttgactatctgttcaatagcgctatcaagaaatgtgttgaaaacggcgagttagtgcaaccaaagggcccctccggcattattaaactaaacaagaagaaggtcaaactctccacgtaaaaagtgaatatccaaacgagaatgtcaatggtgatagcaatactatcaaacctattttctttcttcatttttgtgtcccatcactattagtattttgtattatttctaaatttttttctctctaattttcaatcttattcaagtgtttgttggcggtactgtaaattttcattttttaatctctcccttctctatttgttacttattcggtaaatatctcctttatgattttattcaaattccattcttaactaactaactatactgtttataaatttctcttctcttatatatgcaaggtacagtgtgtaa

SEQ ID NO: 3053 - DNA, 1126 bp, Saccharomyces cerevisiae
tagtgacaagaaggcgtatatcccacttaattcaatattagagtattcgtatttggaatacaggaagagtaaaaataagccaaaaattcattacacctcaatgactgccgacaacaatagtatgccccatggtgcagtatctagttacgccaaattagtgcaaaaccaaacacctgaagacattttggaagagtttcctgaaattattccattacaacaaagacctaatacccgatctagtgagacgtcaaatgacgaaagcggagaaacatgtttttctggtcatgatgaggagcaaattaagttaatgaatgaaaattgtattgttttggattgggacgataatgctattggtgccggtaccaagaaagtttgtcatttaatggaaaatattgaaaagggtttactacatcgtgcattctccgtctttattttcaatgaacaaggtgaattacttttacaacaaagagccactgaaaaaataactttccctgatctttggactaacacatgctgctctcatccactatgtattgatgacgaattaggtttgaagggtaagctagacgataagattaagggcgctattactgcggcggtgagaaaactagatcatgaattaggtattccagaagatgaaactaagacaaggggtaagtttcactttttaaacagaatccattacatggcaccaagcaatgaaccatggggtgaacatgaaattgattacatcctattttataagatcaacgctaaagaaaacttgactgtcaacccaaacgtcaatgaagttagagacttcaaatgggtttcaccaaatgatttgaaaactatgtttgctgacccaagttacaagtttacgccttggtttaagattatttgcgagaattacttattcaactggtgggagcaattagatgacctttctgaagtggaaaatgacaggcaaattcatagaatgctataacaacgcgtcaataatataggctacataaaaatcataataactttgttatcatagcaaaatgtgatataaaacgtttcatttcacctgaaaaatagtaaaaataggcgacaaaaatccttagtaatatgtaaactttattttctttatttatttacagaa

SEQ ID NO: 3054 - DNA, 1289 bp, Saccharomyces cerevisiae
aaatagagtcgatatcctcaacttccctgtaagtcttcacctatagaaactggtcgtaaaacaatgagtcagtttggcacgacagatatcgtttccggttcagaaacaccaccttattctggggcaagttaccaggacgcccaggatgacaatacccatccacattcatcagacgccggtgcagagaagttcagtgcaggcagtggaagcgagtcgcatactgaatcctcgagaagtgatgatgaggattctcaagcaaaaacaaagatggtggataatattaccatcttaaaatatatattggattctctatctggtagagacaaattagccaaaattatcaaatacgctctggatatattaaaactgtttatcgaaaagtctaagcgaaatttaactgttttggacccttccgtattaacgtactataccaagattttgaaaaatctgactgtaaaagtcgcactaaggcatccaatcacggtaattaaagtacttctcctgtctcttttgagaaattttgacaagaaaattgattttatcagtcaacaattaagtacttttagatatattttaaggtttggcggcacaccattccgagtgtgcagtttcttggggaaattcaataaaaccagaaagtgcaactttcaaattgaccaaattaagaaaatatggtttaatgaagcttcattgagagaatttttggacttgtattatggtatctttgatgaattagacttgctatacaaattgaaaatatggacaaataaatcattctattcctttgtcagtagacaagagtctcttgcatggcaatacgacattcttttaagcttgaaggaccattggctcaacctgcaaagcttacagaagagacaattagaattggaagtgcaactaaaagttcaaaataacgcgttactactctcacccatactgatgcatcaggcccataaagacgatggctcacaatcgccaattaggaaacagttgttaaatgacctaaatgttaataacgacgcagaggtgttaatacacaaacaactaaaggccatcaaggatgaaaagacacttgtttatttagatattgcaagattatcgtttgattgcatggctaatacatcagatattctaaatttaaaaactccaaagggaacgtatgccgttctgtccctgggatccggcttaactggactggttaaactttggataacaacaaagaggtcactttgctcttcaaaagattgatatataaaaatatgtatacatatagatatgtacatatatat

SEQ ID NO: 3055 - DNA, 2242 bp, Saccharomyces cerevisiae
gcaaaaagtacattgacaaacaacatttctttaaaagatgagtactccatttggtttagatttaggtaacaataactctgtccttgccgttgctagaaacagaggtatcgacattgtcgttaatgaagtctctaaccgttccaccccatctgttgttggttttggtccaaagaacagatacttgggtgaaactggtaagaacaagcagacttccaacatcaagaacactgtcgccaacttgaaaagaattattggtttggattaccaccatccagatttcgagcaagaatctaagcacttcacctctaagttggttgaattggatgacaagaagactggtgccgaagttagattcgctggtgagaaacatgttttttcagctactcaactagctgccatgttcatcgacaaagtcaaggacaccgtcaagcaggacacaaaggcaaatattaccgatgtttgtattgctgtcccaccttggtacaccgaagaacaacgttacaacattgctgatgctgctagaattgctggtttgaaccctgttagaattgtcaacgacgttactgctgccggtgtttcttacggtatcttcaagactgatttgcctgaaggcgaagaaaagccaagaattgttgcctttgttgatattggtcactcttcctacacctgttctatcatggccttcaagaagggtcaattgaaagtcttaggaactgcctgcgacaagcattttggtggtagggacttcgatttggctataacagaacatttcgccgatgagttcaaaactaaatacaagattgacatcagagaaaatccaaaggcttacaacagaattctaactgctgctgaaaagttgaagaaagttttgtctgctaatactaatgccccattctctgttgaatccgtcatgaacgacgttgatgtttcctctcaattatctcgtgaagaattagaagaattggtcaagccattgttggaacgtgttactgaaccagttaccaaagctttagctcaagccaaattatctgctgaagaagttgattttgttgaaattattggtggtactactcgtatcccaacattgaaacaatccatttctgaagccttcggcaagccattgtccaccactttgaaccaagatgaagccatcgccaagggtgccgcctttatttgcgccattcactctccaactctaagagttagaccattcaagtttgaggatatccatccttactctgtctcttactcttgggacaagcaagttgaggacgaagaccacatggaagttttcccagctggttcatccttcccatctactaaattgatcactttgaaccgtacgggtgacttttcaatggctgctagctacactgacatcacacagttaccaccaaacactccagaacaaatcgctaactgggagatcactggtgttcaattaccagaaggtcaagactctgttcctgttaagttaaagttgagatgcgacccctctggtttacacacaattgaagaggcttacactattgaagatattgaagttgaagaacctattccattaccagaagatgctccagaagatgctgagcaagaatttaagaaggttactaaaactgtaaagaaggatgacttaaccatcgttgcacacacctttggcctagacgctaaaaagttgaatgaattaattgaaaaagaaaatgaaatgcttgctcaagataagctagttgctgagacagaagaccgtaagaacactcttgaagagtacatctacacattgcgtggtaagttggaagaagagtatgctccatttgcttccgatgctgaaaagacgaagttacaaggtatgttaaacaaggccgaagagtggttatacgatgaaggtttcgattccatcaaagctaagtacattgccaaatacgaagaattggcttctctaggtaacattattagaggtagatacttggctaaagaagaagaaaagaagcaagctataagatctaagcaagaagcatcccaaatggctgctatggctgaaaagttggctgctcaaagaaaggcagaagctgaaaagaaggaagaaaagaaggacactgaaggtgatgttgacatggactaatgttaatgcagcaaagtaactagaaaaggatctttattgttttttccgatttttttaactcactttggatacattttttttaatatcttctctgtatagttaaaaaaagattataatataata

SEQ ID NO: 3056 - DNA, 2673 bp, Saccharomyces cerevisiae
acaagattggcagtggcagtaagtgatgaatcctatcaactctctagcgtttgaccttcacagtgttaaacttgcagacgcgaactcagacactgctgcattatcaaatagcaatactccaaccatgaacaatgcggctcttttgcaaaggccctcctccattatggattctattggcgtccaaagagttccatctccttttgtgccagggagtaatgcgattagtggagccagtactgttcccttcaatgcatatgacgctgaaattactggatctccgctacaaatatctgctaatcaggaaaacaatagtgcatttagtgcagcatcatccaacctgcatatgaacgccagcagcccttccgttctcaataaaccctcgagcacatttccaaatgtagctccttatctctacaacgcaacagggcctgcccccaacgttggtaatcaacccccaccaccggggatagaatctcagtggaaatacattgactctaatggtaacattcaggggccttttggtaccaataatatgtcacagtggtatcaaggaggttattttactccaactttgcaaatctgtagattagcaacatctcctgagccatttggtgtaaatgatcggtttattagactaggtgaattgactactctggtgaataattatcaagacccttttgtcgcctttgatttcattgttattagagctttgaatgctgttccacttgttgcaccaacttcatcagaaaagcaaaaagttgagtcaagagatttgatacctgttgctgatgtgcatagtgatgattttacgtatgaagaaatccttggccttaaatttgaagatggaagttactatcatgaaactcaggtttgggttccggttgacggccgtcatatcacaaaggtagatcgcataccaaagatatctgcatataccgctcctctatccacgacttctagtagatctaataaaaccacttcttcccatgaagagaaggttccttcccacgaggaagcttctccagaggagcaagaggttttttcagaagagggcagaactgtttctaacataacaaatgaagaggaatctattgtcaaaaatcctactaagcaggaggaagaatctcgaggaagcgagaaagagcaaaatatattggatcaagttcaaccagagattgaagaggtagaccgtaaggatgtaatatccactgctgatgagccgaaaagcaaagatacgccgcaaatgacttctgaagagcagaaaaggtttgcaaaggcagaactgatggcacaaaaattattggaagaacaacaaagacaagaagaagaaaaaaagagaagagaagaacagcgcaaattaaagaaggagaaaaaattgaagcaaaagcagaaaaaggaagaagagaagttaaaaaagaagaagaaggaagaaggaaaattagagaaagaaaagcaaaaagaattgctaaataacattttaactggagatacagaaactccatcttccgaaaacaccgcaacttccataaccactaatttggcgccttgggctaacaagaaacccgagggtgctgtttataatcagatttcatctgctcttgaagatttgaagaaggagaactcgtccaagaaagaaaaaaaacctaatcgtactcagttagatcgtgagcaggcattaaaactacagaaagaaatattaagctcggcgcaaattccgaaaactcaaactggttctgcctggggtataaagccacagcaaccgatcaaagttgatattaaaggagaattgatgaaagacagtaccaaaattaacagtcagtctaaaattaacaaggccaacaatggtgatattaaaccagattccacttttattgaagagcagaaaaagctgtgggaacaagttcaaaagaaaacaaagaaattcaaccgcgcttcttcactcgatgatttcatttcaagaacgccttccccatcttcttcggcattgaactcttcgaatactagcaatgcgtggaccacggtttcttctaagagcacaacccacatcgcttccaccatgcctgtcgctggtaaccagtcaaagtcatatatcagtttggacacactgcgttcttctggggggttatctaccgcaacaaaaactaaaatgagcgataagagtaaacaaattggctcatccactagtatcccgactttaaaggcccgtcaagttaaaccgtctcgcatccctgcctatcccggtaacgcttctgtctctaagcgtcaagaatttttgagatggtgccgatcccaattaaaactaaatacgggtgttcagcccgataatgttttagaaatgctacttagcttgcccccaggttcagaatccaaggaaattatcgcagataccatatattcctacagttcaacaatggacggtaggagatttgccactgatttcatcaaaaaacgtctagaatgcgaagaagaaattaatgaccccttgagctggagtgaagtattagctatgcctgaaggcagttccgaagactgggaatttcaagttgttggtaaaaagaaaggaaaaagattttgaagcctttttgttccatagtagttgtttactacgcgtgtatatcttctattcaatgtattaactagtataactcccatctatttgtataattaattgaa

SEQ ID NO: 3057 - DNA, 682 bp, Saccharomyces cerevisiae
atgttaaaaagacgctctaatgctctcattactttgagtagaactaaattgtttcccataacaaccgttgcctattaccacaggcgcctcctcaaccaacaacgaagagctgtttcaacgtcaccgaagaaagaaatcaagagcctagaagacttggctaatttggattctttggatggtgttgatactgaactgatacgcgatttgattaatgagcatactacaaaattaaatatcaaaaaggagttagatatgctcaaaaaattctcgcaagaggaagaatcaggacatgagatccctgtaaaaagatttattaggcctctttggatgttcattctaatgggatcttccgtttatttactgcttcacttctcttggtggaaactagagcatgaggagagagaaagtcagctaaagaaagaggtagaaatcctggaacaccaattaaatgagttaattgtacaggataaaacccacaatactagtaggggaaagggcagtaatgaatcaacacatatgaagccttggtataggagatggttttggtgagaattagttatcttgttggcttttcgtgtttctagaatgtaccattgcctatgtaaatattttcaaattgcttgttttgaagatttctaccctctttagcaattcacacgtgaatacgtacaatatctattaa

SEQ ID NO: 3058 - DNA, 510 bp, Saccharomyces cerevisiae
acaagatcatatagcacaaatagcgcaacagcttcaagtccaatattaagatataatgcctcctcttccacaaaattatgcgcaacagcagccttcgaattgggacaaattcaaaatggggttgatgatgggtactaccgtcggtgtctgcacaggcatcctatttggtggatttgccatcgcaactcaaggcccaggtcctgatggtgtagttagaacactagggaaatacattgctggttcagcgggtacctttgggctatttatgtccatcgggtctataatcagaagtgatagtgaaagtagtccaatgtcccatcctaacctgaacctacagcaacaggcaagactggaaatgtggaagcttcgtgccaaatacggtatacgtaaggactgagggggaaattttgcatatatttacgcttccccatcgttttcttaaacattgttacttatctgcttatttttatttaagatatctatctacctgtttataactctctcaatacc

SEQ ID NO: 3059 - DNA, 321 bp, Saccharomyces cerevisiae
caattacatgattgagaatttataagcgcatgagaccacgtgaccaaggctttttggttttagggtttacttactcggtactcctaattagtcttgctacattttactggttacgcaacaatgactctttcctgcactactggtgtgtattactgctatgccctgcgactctctggctgtgggccctcatagcctggtgtgacagtgaaatgttcgcaagtagtaaagatgaataatcgtttataatcttatttacaagtcagtgcataaaatgatataatatcacctcacgcatgcctattttatacatgtactttatat

SEQ ID NO: 3060 - DNA, 1558 bp, Saccharomyces cerevisiae
tctatatagaagctatttgctgacacttgcttacaggaatcgattatataagaagggttctgcatctggttgcctacttagttttcggtatttttgaagattagcaaaaagatcaagatatcaagtattttcatatttgtcattttaatgtttcgctcgggttactatccaactgtcactcctagccattggggctataacggcaccgtcaaacatgtactgggagagaaaggaaccaagtctttggctttcagagattctaagcgccaaattcctcttcatgaattcgtaaccaaacacgtgcctacactcaaagatggtgcaaattttaggttaaacagcttgcttttcacaggttacttacagaccctttatttgtcagccggtgatttttccaaaaaatttcaggtattttatggaagagagattataaaattttctgatggaggggtctgcactgcagattgggttatgcctgaatgggagcaaacatattcattaaatgctgaaaaggctagttttaacgagaaacaattttcgaacgatgaaaaggccacccatccaaagggttggcctcgtcttcacccgagaactagatatctatcctctgaggaacttgaaaaatgtcattctaagggttattcttaccctttagtggtagtacttcatggtcttgcagggggaagccatgagcctctcatcagggcattatctgaagatctatcaaaagtcggtgacggtaaattccaagtggtagtccttaatgctagaggttgctcaagatctaaagtcaccacccgtagaatctttaccgcattacacacaggtgatgtgagagaatttttgaaccaccaaaaagctctatttccgcaaagaaaaatatatgcagtcggaacatcatttggagcagccatgctaacgaactacttaggtgaagaaggagataactgtccattaaatgctgcagtcgctctctcaaacccatgggatttcgtacacacttgggacaagttggctcatgattggtggtccaaccatattttttctagaactttaacacaatttctaacaaggactgtcaaggttaatatgaatgagttgcaggtaccagagaattttgaggtttcgcacaaaccgacagttgagaaaccagtcttttatacgtataccagagaaaatttggaaaaggctgaaaaatttacagacatattagaattcgataatcttttcactgccccatcgatgggcctgccggacgggttaacatattatagaaaggccagttcgataaatagattgcctaatatcaaaatcccaactttaataatcaacgcaacggatgatccagttacaggtgaaaacgtaattccgtacaaacaagctagagaaaatccttgtgtgttgttatgcgagactgacttgggtggacatttggcttatctcgacaatgaaagtaattcctggttaacaaagcaagctgccgagttcttgggcagctttgatgagttagttttataaatatgttcttagataaaattccttacacataataatctgt

SEQ ID NO: 3061 - DNA, 881 bp, Saccharomyces cerevisiae
acacaggagaacatgtcagccgtaggtccaggtagcaatgcaggtgctagtgtcaatggcggatctgctacagccattgctactcttttacgcaaccataaggagttgaagcaaaggcagggtttattccaggccaagcagacagacttcttccgttacaagagatttgttagggcactgcattctgaggagtatgccaacaaatctgcaagacagccagagatatatccaactataccttctaacaagatcgaagaccagcttaagtcacgtgaaatctttattcaacttataaaggcacaaatggtgatcccagtgaaaaaattgcatagtcaagaatgcaaagagcatggattgaagccaagcaaggactttccgcacttgattgtttcgaataaagcacaattggaagccgatgaatactttgtttggaactataaccctagaacctacatggattacttgatcgtcattggtgtcgtgtccatcatattggcgctcgtatgctacccattgtggccgcgctccatgagacgcggctcctattatgtgtctctgggtgccttcggcatcttagcaggcttctttgctgtcgctatcctgagattgatattatatgttttgtcattaattgtctacaaagatgttggtgggttctggatctttcccaacctgttcgaagattgcggtgtactagagagttttaagccactttacggttttggtgagaaggatacttatagttacaaaaagaaactgaaaagaatgaagaagaaacaagccaagagagaaagcaataagaagaaagccatcaatgaaaaagccgaacaaaactgaacttccattatcctgtatagctctactgtataaaccttctatat

SEQ ID NO: 3062 - DNA, 880 bp, Saccharomyces cerevisiae
gtgacaaaagagtgaagacagactatacatcatgaagttgaacatttcttacccagttaacgggtctcaaaagaccttcgaaattgatgatgaacaccgtattcgtgttttcttcgacaagagaatcggtcaagaagtcgatggtgaagccgttggtgacgaattcaagggttacgtcttcaagatctctggtggtaacgacaaacaaggtttcccaatgaagcaaggtgttttgttgccaactagaatcaagttgttgttgaccaagaacgtttcttgttacagaccaagacgtgatggtgaaagaaagagaaagtccgtcagaggtgccattgttggtccagatttggctgtcttggctttggtcattgtcaagaagggtgagcaagaattggaaggtctaactgacactactgttccaaagagattgggtccaaagagagctaacaacatcagaaagttcttcggtttgtccaaggaagatgacgttcgtgatttcgtcatcagaagagaagtcaccaagggtgaaaagacttacaccaaggctccaaagatccaaagattggttactcctcaaagattgcaaagaaagagacaccaaagagctttgaaggtcagaaacgctcaagctcaaagagaagctgctgccgaatacgctcaattgttggctaagagattgtctgaaagaaaggctgagaaggctgaaatcagaaagagaagagcttcttctttgaaggcttaaagttagaaagcagtaaaagataaattcttttgttcaaaaactcctttcttattctgtattttgtgtatttttaagcttaaaatcaaataactttattttttatataattaacaaaaagaaaaataatcatatgtattg

SEQ ID NO: 3063 - DNA, 1794 bp, Saccharomyces cerevisiae
gaaaatcgaagaacaccctgacaaagatggctcgtcatggaaaaggcccaaaaactaacaaaaaaaagctagcacctgaaaaggaaaggtttatacaatgttgtgctgatatcacattagagttaacagattctttaacctcgggaacaacaagagaaattaatctgaatggtttgattactaaatattcaaagaaatataaactaaagcaacaaccaaggttaaccgatatcattaattctattccagaccaatacaaaaaatatttattacccaaattgaaggctaagccagtaagaacagcatcgggtattgcagtggtagccgttatgtgtaaaccacatcgttgtcctcacattgcatatacaggtaatatttgtgtttattgtccaggtggtccagattcagattttgagtattctacacaatcttacacaggctatgaaccaacttcaatgcgtgccatcagagctcgttatgacccttatgaacaagcacgtggtagggtggaacaattgaaacagttaggtcactccatcgataaagtcgaatatgttctgatgggtggtacatttatgtcattaccaaaagaatatcgtgaagattttattgtgaaattgcataatgcactttctgggttcaatggtaatgatattgatgaagctattctttattcgcaacaaagtttaacgaagtgtgttggtataacaatcgaaactaggcctgattattgtacgcaaacacatttggacgatatgttaaaatatggctgtaccagattagaaattggtgttcagtccttgtacgaagacgttgctcgtgatactaatagaggacacaccgttaggtctgtttgtgaaacttttgctgtgtctaaagatgctggttataaggttgtttctcacatgatgccagatttaccaaatgttgggatggaaagagatattgaacagttcaaagagtattttgaaaatcctgattttaggactgatgggttgaaaatctatccaactttagtcattaggggtacaggtttatacgaactttggaaaacgggcaggtataagtcttatagtgccaacgccttagtggacttagttgctagaatcttggccctagtgcccccatggacaagaatctaccgtgtccaaagagacattccaatgcccttggttacctcaggtgttgacaatggtaacttgagagaattggcattagctagaatgaaggacttgggtacaacttgtagggatgttcgtactagggaagtgggtatccaagaagtgcatcataaagttcaaccagatcaggtcgagcttatcagaagggattactatgcaaatggtggttgggaaacctttttatcatatgaagatccaaagaaagatatactgattggtttgctgagattgagaaaggcttcaaagaaatatacatatagaaaagaattcacctcccagaggacttctattgttagagaattgcatgtttatggttctgtggttccacttcattcaagagatcctcgtaaattccagcatcaagggtttggtactctattgatggaagaagcggaaagaatcgccaaggaagagcatggttcagagaaaatttctgttatttctggtgttggtgtaagaaattactatggtaaactaggatatgaactagacggtccatacatgtcgaaaagaatttaaaggtaaatagaacttttatgtgccgccgacatggccggttttccaagcagaaatttaaatatatttaagtaaataattgtttatactattcatt

SEQ ID NO: 3064 - DNA, 1511 bp, Saccharomyces cerevisiae
atataaacatacataaaacctctgttcttctgccaatttaaatgcaattcgctgggaagaaaactgatcaagtgaccacatctaatccgggctttgaagaagaagaagaagaagaagaagaactacaacaagattggtcgcaactcgcatcgctcgttagcaaaaatgctgctctttcacttccaaagaggggtgaaaaagactatgaaccagatgggactaatttgcaagatctgcttctctataatgcaagtaaagccatgtttgataccatatcagactcaataagaggcacaacagtaaaatctgaagtaagaggatactatgttccccataaacatcaagccgttctacttaaacccaaaggcagctttatgcaaacgatgggaagggctgatagcacaggcgaactctggcttgacttccatgagtttgtttatttggcagagagaggcactattcttccttattatagattagaagcaggctctaacaaaagctcaaagcacgaaacagagattttactcagtatggaggatttgtattcgctgttttcatcgcaacaggaaatggaccaatattttgtgtttgctcatttaaaaaggttgggttttattctaaaacccagcaatcaagaagcagcagtcaagacttcctttttcccattgaaaaagcaacgaagtaatttacaagcaatcacttggagattactttcattgtttaaaatacaagagttatcgctgtttagtggtttcttctattctaagtggaattttttttttcgtaaatatacgacttcaccacagttataccagggtttaaataggcttgttcgttccgtggctgtaccaaagaataaaaaagagctattggatgcacaatctgatagggaatttcaaaaggtaaaggatattcccttgacatttaaagtatggaaaccccattctaatttcaagaaaagagaccccggtcttcctgatttccaagttttcgtttacaataaaaatgacgatcttcagcattttcctacctataaagagctgcgatctatgttttcctcacttgattataaattcgaatttttaagcgaaatcgaggatgatgacgattgggagacaaactcctacgttgaagatatcccacgaaaggaatatattcataagaggagcgcgaaatctcaaactgaaaaaagtgagtcgtctatgaaagcaagttttcaaaaaaaaactgcacagtctagcacgaaaaagaagagaaaggcgtacccacctcacatacagcaaaatcgtagattgaagacgggatatcggagctttattatcgctattatggataatggccttatttcgtttgtaaaaatgtccgaggctgattttggatctgaaagtgtatggtatacacctaatactcaaaagaaagtagatcaaagatggaagaagcattaaagggacttttgctaaatcgcagtttctttatccttgcaaaactggctttcaacaaatccggtatat

SEQ ID NO: 3065 - DNA, 1021 bp, Saccharomyces cerevisiae
attttattaaaagactgacgagaattcagtacctcctaagtgcgcaagagataaaatgagcatgagtatgggtgtccgtggcctagcgttaaggtccgtttctaaaacattatttagccaaggtgttcgttgtccttcgatggtgattggagcccgttatatgtcttccactccagaaaaacagacagatccaaaagcaaaggctaactctatcatcaatgccattccaggtaataatattttgacaaagacgggggttttggggacttctgctgccgctgtcatttatgccatttccaatgaattgtacgttatcaacgatgaaagtattttattgctgacttttttgggtttcactggtttagtggcaaagtatttggcgccagcatataaagattttgccgatgcaagaatgaagaaagtctccgacgttttaaatgcctcgagaaacaagcatgtcgaagctgttaaagatagaatcgactctgtctctcaactacaaaatgttgctgaaactacaaaggttttgtttgatgtttccaaggaaactgttgaacttgaaagcgaagcctttgaattgaaacaaaaggtagaattagctcacgaagcaaaggcagtcttagattcgtgggttagatatgaagcttccttgcgtcaattggaacaaaggcaactagcaaaatctgtcatctccagagttcagtcagaattgggtaatccaaaattccaagagaaagttttgcaacagtctatatctgaaattgaacaattgctttctaaattgaagtaatcacaacagtaactgcgacaagaatgaaagaaaaggaaaggaaaagaaaaacaatacggaaaggcaaaaaattaaaaaaatggcgccttatgagttcagtttgataacgatgaagtgcactatctgaaaaaggatgctcaggttatatatctcttcttgtacagacattgatgttttaaatactacaaatattcttagattcactttatacttcacacatttttttaagta

SEQ ID NO: 3066 - DNA, 729 bp, Saccharomyces cerevisiae
tatttgtattgcacttgatttacttataacagcttaggtttacaatgcaacaagatatcgtcaacgatcaccaggaggaggcccaagggtggaagtgggaacaaatcaaagagataattgaatcgggggagcttgcccgtttgaaacgaagtcgccagatgactgacaaataccacgagcataagaaaaggactgctggcctggacatgaaccagtacgttttgcaaaaactaggctggtcgctagacgaaccgcagctcgaaaatgctgccgcgaaggcttttagttcttctactctatatgctgtgcgtgccaacgatttcccgtataacttcgagcctggtgttgtacaccttgttctctggtccaaggttgccctgccagtacattccccagataaggccgtgcgcgaagcggcccgcgctcgcatgaatgcatttttgcaggcacagccgctactgcgtccacttctaagctcgggtcacgtggcctggtttgtcaactacccggaactacaaagtgttgcccggattttccacgctcacgtgctgcttttcttcccacgggaacgctattccgcggaacaggtaaaaacgaccgttgatgatatcctttcacacggtttcgagccacttgcctgataaagttttttttttttttttcagcatgccaaaatgctacatacatttgttaattatgtactataaccgatactggtattaatgatgc

SEQ ID NO: 3067 - DNA, 4915 bp, Saccharomyces cerevisiae
ataatagtataacaataggataatctgaaaaataaacgggaacgttaaacagttttattcttcaatcaatatattcttctgctttttttctctctgttttcccagttactaattttcacttaaaaaaaaggtttacagatttattgttattgttcttattaataaaaaaatgtcttcgactgacgaacatattgagaaagacatttcgtcgagatcgaaccatgacgatgattatgctaattcggtacaatcctacgctgcctccgaaggccaagttgataatgaggatttggcagccacttctcagctatcccgtcacctttcaaacattctttccaatgaagaaggtattgaaaggttggagtctatggcgagagtcatttcacataagacaaagaaggaaatggactcttttgaaattaatgacttagattttgatttgcgctcactattacattatttgaggtctcgtcaattggaacagggaattgaacctggtgattctggtattgcctttaaaaacctaacagcagtcggtgttgatgcctctgctgcatatgggcctagtgttgaagagatgtttagaaatattgctagtataccggcacatctcataagtaaatttaccaagaaatctgatgtcccattaaggaatattattcaaaattgtacgggtgtcgttgaatctggtgaaatgttatttgtcgtcggtaggccaggtgcaggttgctccactttcctaaagtgtctatctggtgaaacttcagaattagttgatgtacaaggtgaattctcctatgatggtctggaccaaagcgaaatgatgtctaagtataaaggttacgttatttactgtcccgagcttgatttccatttcccaaaaattactgtgaaggaaacaatcgattttgccctaaaatgtaagactcctcgtgttagaattgacaaaatgacgagaaagcaatacgttgataacatcagagatatgtggtgtaccgtttttggtttaagacacacatatgccaccaaagtcggtaacgatttcgtaagaggtgtttctggtggtgaacgtaagcgtgtttccttggttgaagctcaggcaatgaatgcctccatctactcttgggataacgccacaagaggtttggatgcctctactgctttagagtttgcccaagccattagaacggctacaaatatggtaaacaactctgctattgttgctatttaccaagctggtgaaaatatttatgaattatttgataaaactactgttctatataacggtagacagatttacttcggtcctgctgataaagctgttggatatttccaaagaatgggttgggttaaaccaaacagaatgacctctgcggaatttttaacatccgtcacggtcgattttgaaaataggacattggatattaaacctggctatgaagataaagttccaaaatctagttcagagtttgaggaatactggttgaactctgaggattatcaggaacttttaagaacttatgatgattatcaaagtagacaccctgttaatgaaacgagagatagactggatgtggccaagaagcaaagactgcaacaaggccaaagagaaaattctcaatatgttgtcaattattggacacaagtttattattgtatgattcgtggttttcaaagggttaagggtgattcaacgtatactaaggtctacttaagttcttttttgatcaaagctttgattatcggttctatgttccacaaaattgatgacaaaagtcaatccaccacggcaggtgcttattctcgtggtggtatgttattctatgttttattgttcgcttctgttacttccttggccgaaattggtaactctttttctagtagacctgttattgtcaaacacaaatcatattccatgtaccatttgtctgcggaatcgttacaagagattatcactgagttccctactaaatttgtcgctattgtgatactatgtttgattacttactggattccatttatgaaatatgaagctggtgctttcttccagtatattttatatctactgactgtgcaacaatgtacttctttcattttcaagtttgttgctactatgagtaaatctggtgtggatgcccatgccgtcggtggtttatgggtcctgatgctttgtgtttatgctggttttgtcttgccaattggtgaaatgcatcattggattagatggcttcatttcattaatcctttaacttatgcttttgaaagtttagtttccactgaatttcaccacagggaaatgttgtgtagcgccttagtcccatctggtcctggttatgaaggtatttctattgctaaccaagtctgtgatgctgctggtgcggttaagggtaacttgtatgttagcggtgactcttacatcttacaccaatatcatttcgcatataagcatgcttggagaaattggggtgtgaacattgtgtggacttttggttatattgtgttcaatgtcatcttatcagaatatttgaaacctgttgagggaggaggtgacttgctgttatataagagaggtcatatgccggagttaggtaccgaaaatgcagatgcaagaaccgcttccagagaggaaatgatggaggctctgaatggtccaaatgtcgatttagaaaaggtcattgcagaaaaggacgttttcacctggaaccatctggactacaccattccatacgacggagctacaagaaaattattatcggatgtctttggttacgttaagcctggtaagatgaccgccttgatgggtgaatccggtgctggtaaaactaccttgttaaatgttttagcacaaagaatcaatatgggtgtcatcactggtgatatgttagtcaatgccaagcccttgcctgcttctttcaacagatcatgtggttatgttgcgcaagccgataatcatatggccgaattatctgttagggaatccctgagatttgcagccgagttaagacagcaaagttccgttccgttagaggagaaatatgaatatgttgaaaaaattatcacattgctaggtatgcaaaattacgctgaagccttagttggtaagactggtagaggtttgaacgttgaacagagaaagaagttatctattggtgttgaactggttgctaaaccatcattattattgtttttggatgagcctacctctggtctggactctcagtctgcttggtcaattgttcaattcatgagagccttagctgattctggtcaatccattttgtgtacgattcatcaaccctctgctaccttgtttgaacagtttgacagattgttgttgttaaagaaaggtggtaagatggtttactttggtgacattggtccaaattctgaaactttgttgaagtattttgaacgtcaatctggtatgaagtgtggtgtttctgaaaatccagctgaatatattttgaattgtattggtgccggtgccactgctagtgttaactctgattggcacgacttatggcttgcttccccagaatgtgccgctgcaagggctgaagttgaagaattacatcgtactttacctggtagagcagttaatgatgatcctgagttagctacaagatttgctgccagttacatgactcaaatcaaatgtgttttacgtagaacagctcttcaattttggagatcgcctgtctatatcagggccaaattctttgaatgtgtcgcatgtgctttgttcgtcggtttatcatatgttggtgtaaatcactctgttggtggtgccattgaggccttttcgtctattttcatgctattattgattgctctggctatgatcaatcaactgcacgtcttcgcttatgatagtagggaattatatgaggttagagaagccgcttctaacactttccattggagtgtcttgttattatgtcatgctgctgttgaaaacttttggtccacactttgtcagtttatgtgtttcatttgctactactggccagctcaattcagtggacgtgcatctcatgcaggtttcttcttcttcttctatgttttaattttcccattatattttgtcacatatggtctatggatcctgtacatgtctcctgatgttccctcagcttctatgattaattccaatttgtttgctgctatgttactgttctgtggtattttacaaccaagagagaaaatgcctgccttctggagaagattgatgtataatgtatcaccatttacctacgtggttcaagctttggttacaccattagttcacaataaaaaggtcgtttgtaatcctcatgaatacaacatcatggacccaccaagcggaaaaacttgtggtgagtttttatctacctatatggacaataataccggttatttggtaaatccaactgccaccgaaaactgtcaatattgcccatacactgttcaagatcaagttgtggctaaatacaatgtcaaatgggatcacagatggagaaactttggtttcatgtgggcttatatttgcttcaatattgccgctatgttgatttgttactatgttgtaagagttaaggtgtggtctttgaagtctgttttgaatttcaagaaatggtttaatgggccaagaaaggaaagacatgaaaaagataccaacattttccaaacagttccaggtgacgaaaataaaatcacgaagaaataaacaagcaagcaaatatatttgtatttcgtggtttaacacacaatttttattttcaattttttttcacaaattttggcgtcctttaacatcatttttttaattttacatttgattttactttctattattattttccgaaaatttcacactaatgttttatgtatagaatcaatataattatttaatatattaattattaataccatttaa

SEQ ID NO: 3068 - DNA, 1677 bp, Saccharomyces cerevisiae
attcccgtcatattttgcttcgcatgttttgttttctttaacctgttgtaatattcatcatcggattcaaataaacacatacaaacaaacaataaatcggaagacacttttcattttcgcatatttgctttactctatttttctgattttccgctgttgcactcacgatgagaaaagaattaaaataccttatctgcttcaacatactcctcctgttatctataatatactacactttcgatttgctaacgttgtgtattgacgatactgttaaagatgctatacttgaggaagacttaaatccagatgcacctccaaagcctcaactaatacctaaaatcatacatcagacttataaaacggaagacatccctgagcactggaaagagggtagacaaaaatgtctcgatctacatccagattacaagtacatcctatggacggacgagatggcctatgagtttataaaggaagaatacccgtggtttctcgatacttttgagaactacaaataccccatagaacgtgccgatgccattcgttactttatcctgtcccattatggtggtgtatacatcgatttagatgacggctgcgaaaggaaactagatcctttgttagctttcccggccttcttaagaaagacttcacctttaggtgtctcaaacgatgtcatgggttctgtgcctagacatcccttctttttaaaggctttaaagtctttgaaacactatgacaagtactggtttatcccttacatgactattatggggtctactggtccgttgtttttaagtgttatttggaagcagtacaaaagatggcgcatacctaagaacgggacagtaagaatcctacaacctgcttactacaagatgcatagttattcatttttctccattactaaaggctcttcatggcatttagatgatgcaaaattgatgaaagcactagaaaaccacatcttatcctgcgtcgttaccggatttatttttggcttctttatcctatatggtgaattcacgttctattgctggttgtgttccaagaatttcagtaatctaaccaaaaattggaaacttaatgctataaaagtaagatttgtcacaattctaaattcattaggcttaagactaaagttgagtaaaagtaccagtgatactgccagtgccactttgctggcaaggcagcagaaacgattgaggaaagattccaatacaaacatagtgttactaaaatcttcaaggaaaagtgatgtttacgatttagaaaagaatgattcttctaagtactcactgggaaataacagctcgtaagagaatggtatgactccaacaattcatatcagactttatatttcaattcgcggcaaaaaaagcaaaagaaatgggaaggaaaattgcatgggatgaaaaaaaaatacaaaattgatacaaatctctagcagcctgaagaccagtcttgtacttcgctactttgcaagacaaggagtactatttgctcgcttcttacgacatactactccgcttggcacgcctgtctaccttgctttttttgctcgtcatttttttttttcgcatgctccctatttcatgttacaatttacgacctccagcatcaacataatcattcttcaaaccaggcctgttttattactgtgatattaccctctatact

SEQ ID NO: 3069 - DNA, 1514 bp, Saccharomyces cerevisiae
caagactagagggatactaagcgttcacccaaccttttgtgccctttagtgaagataagataaggtaagatgcacgtactgctgagcaaaaaaatagcacgctttctgttgatttcgtttgttttcgtgcttgcgctaatggtgacaataaatcatccaaaaacaaagcagatgtctgaacagtatgttacaccataccttccgaaatctttgcaacctattgcaaaaattagtgcagaggaacaaaggcgtatacaaagtgaacaggaagaagccgaattgaagcaatctttagagggagaggccattagaaatgccaccgtgaatgccattaaggaaaagatcaaatcttatggtggtaatgaaacgacgctagggttcatggtgccatcgtatatcaatcatagaggatcaccaccaaaggcgtgctttgtctcactaattactgaaagggattccatgacccaaatcttacaatctattgatgaagtgcaggtgaagtttaacaaaaattttgcttatccttgggtttttattagtcagggggagcttgacggaatgaagcaagaaatgattcgtcaagccataactgattctatgaatggtgatcctgagttaattaatattaaatttgctgaaattcctgcagacgaatgggtataccctgaatggattgatgaaaataaagcagcagaatcgctaatttcattagcaaatgtaccggatggtgattctagagctgtaagatatcaagctagatattttgcagggtttttttggaggcatccagttctggatgagtttgattggtactggagagtagaccctggtattaaattgtactgtgatattgatcatgacctttttaggtggatgcaagatgaaggcaaagtgtttggtttcacattgagtatgagtgaagctaaggaagccaatgagaagatttgggatgttacgaaaaaatttgcaaaggattttccaaagtttatttccgagaataatttcaagtcatttattacaaaaaaggactctgaagattttaacaactgtgaattcacatcaaattttgaaattggtaatttgaacttttatagatcgccagcttacaggaaattttttaattacatcgacgaagagggcggtattttctactggaaatggtctgattccatcatccacacaattgggttatcgatgctgttgccaaaggataaaatacattttttcgaaaatataggattccattatgacaagtacaataactgtcccctaaacgatgatatatggaaccaatataattgtaactgtgaccagggtaacgatttcacgtttagaagtggttcatgtggcggacattacttcgacattatgaagaaagataagccagaaggttgggataggttaccataaatcaaaacactgatgtataagaacaataatcttctacatatgaatatatatacatatgtatttatttattttatttaatttttaattaggatcgcgagaaagag

SEQ ID NO: 3070 - DNA, 1445 bp, Saccharomyces cerevisiae
acccgttatttctgaacctatttttccttccgcactttgtgaaagtaagaagagaatagcatcaattttagtatttttcaaacagaagaatttaaaagagctagaataaaaagttaggaaacaatgtcactttctcttgtatcgtaccgcctaagaaagaacccgtgggttaacatttttctacctgttttggccatatttctaatatatataatttttttccagagagatcaatctctgttgggacttaatggccagtccatttcccaacacaaatgggcacacgaaaaggaaaacacattttattttcccttcaccaagaaatacaaaatgccaaagtactcttataagaaaaaaagcggctggttgttcaacgatcacgtggaagatattatcccagaaggtcatattgcacattatgatttgaacaaattgcactctacgtcagaagcagctgtcaataaggagcatattttgatattgactccaatgcaaacatttcatcaacaatactgggacaatttgctgcagctaaattaccctcgggaattgattgaattggggttcattacaccaagaacagccactggtgacttggccttaaagaaattggagaatgctattaaaaaggttcaaacggacaagaaaactcaaagatttagtaaaattactattttgcgacagaattcccagagttttgataagttgatggagaaggaaagacacgctttagatgttcaaaaggaaagacgtgcagcaatggctttggcgcgcaatgaattactattctccaccataggacctcacacttcttgggtgctgtggctagatgccgatattatagagacaccaccatctttaattcaagacatgaccaaacacaacaaagctatcttagctgcaaacatttatcaaagattttacgatgaagagaagaagcaaccatcaatcagaccatacgatttcaacaactggcaagaaagtgacaccggtttagaaatagcctctcagatgggtgatgacgagattattgtcgagggttatgcagaaattgccacttataggccattaatggctcatttctacgatgctaatggcgtaccaggtgaagagatggcgctggatggtgttggtggaggctgtactttggtcaaagcagaagttcacagagacggtgccatgttccctaatttcccattttatcacttgattgaaacagaaggttttgctaagatggcgaagagattaaactacgatgtatttggcttaccaaactatttggtttatcacatagaggaagagaaccattgagcaactgagcaaaaagcatacagaagctatagcgttattgaaagataatattgttgcgattattagttgaaaataaacaaaacaagatatatattcatatatatatatatataatttacacatgtatattaaaa

SEQ ID NO: 3071 - DNA, 1628 bp, Saccharomyces cerevisiae
tgctttgcgtttttttagcttatacagaagaaacgcacttaaaaagaatcaaatcagtaacaaattttggtattgtttctcaaagaagaaaatagaaagtgagaatggccgtatcagcccgtttgagaacgactgccgaggatacatccattgctaaatcaacacaagatccaattggtgatacagaaatcagtgtagcaaatgctaagggcagcagcgatagcaacattaagaattcgccaggcggaaacagcgttggtcaggagtcggagctagagcatgtccctgaggaggatgactctggtgacaaggaagcagatcatgaggattctgagacagccactgcgaagaagaggaaagcccaaccattgaagaatccgaagaaatcattgaagaggggcagagtcccggcgcctttgaatttatcggatagcaacactaatacacacggtggtaatattaaggacggcaacttggcttcgtctaactctgcacattttcctcctgttgctaatcaaaacgtgaaaagcgcgcccgcacaagttactcagcattccaagttccagccccgtgtccaatacttgggaaaggccagttctagacaatctatacaagtgaataatagcagcaatagttatgggaaaccacacatgccctcggcgggcatcatgagcgccatgaacccttacatgcccatgaatcgctacataatgtcaccatattataatccgtacggtatccctccacctcacatgctgaacaagcccataatgacaccctacgtgtcgtatccatatccaatgggaccgcggacctccattccttatgctatgcaaggtggcaacgctaggccctacgaagaaaatgagtatagtgctagcaattacagaaacaagagggttaacgactcatatgattcgcctttgagtggcaccgcttccactgggaaaaccagacgatccgaggaaggctcaagaaattctagcgtaggatcaagtgcgaatgccggtcctacgcaacagcgcgcggatctacgcccagcagatatgatacctgctgaagaataccactttgaacgggatgcattactctcggccaacacgaaagccagaagcgcaagcacaagcacaagtacaagcacaagcacaaaccgggacaggagttcatggcatgaggcagaacccaataaagacgaagaagagggtacggacttggccatcgaggacggagcggtccccactcccacttttactacgttccagcggacctcgcagccgcagcagcaatcacctagtcttcttcaaggcgaaatccgactctcatcgcatatttttgccttcgagttccccctgagctctagcaatgtagacaagaaaatgtttatgagcatatgtaataaagtatggaatgaatcaaaggagctgacaaaaaaatcatcatcacatcacagaaccggaaaatagtagccacacaggcacttataaacttacatacactcgcatacactcacctactcacacacgcactcacacacacactctcactcgcacaccaaggacaattcagtacatacacaatttttatataagtttgataaactaaaagatgagggtgagtattcaccttat

SEQ ID NO: 3072 - DNA, 535 bp, Saccharomyces cerevisiae
tctcacaccagacgcgactcataattcataatgccaattgaccaagaaaaattagctaagctacaaaagttgtctgctaacaacaaagttggtggtactagaagaaagcttaacaagaaggcaggctcttctgccggtgccaacaaggatgacaccaagttgcaaagtcaattagctaagttgcacgctgtcaccattgacaacgtcgccgaagccaactttttcaaggacgacggtaaggtcatgcacttcaacaaggtcggtgtccaagttgctgctcaacacaacacttctgtattctacggtctaccacaggaaaagaacttgcaagatttgttcccaggtattatctctcaattgggccctgaagccatccaagccttgtctcaattggctgcccaaatggaaaagcacgaagccaaggctccagctgatgctgaaaagaaggatgaagctattccagagttagttgaaggtcaaacttttgatgctgacgtcgaataaataacttaatctttaattttaacgttaaata

SEQ ID NO: 3073 - DNA, 2772 bp, Saccharomyces cerevisiae
atcagaacaaagcaagcaaaaccaagaacaaacagaaaggggagaaatagttatcggttcgttccctggttttacttccttttttttttctttcattttataacacacaactccagcagtctgacgctcaccaataagatcaatttcgtttaattgctttgctcgccctcacacacgttatagttatgtcgtcttcctcacttcgagttttagctattgggaacaacccgaatatcttgttctacacctcaaggtttcaactggccaagaatatagacctctaccacgtcaacgattcaaaatcatgtcaatttgaaattgaaactgaatactacggcaaagaccggttcgaattggaaaatcatttcacctctatcgagcacttgactgaagctttgagctccaaatcaagtgaagccgtcttcgacataatcatcatgagtgctccatctttacaggaattatcctcgttagcgtccaagttaacgtccataatcgattcgaacaccaaaattttcttagaaagcagtggtttcatccaattggaaccgtttgtcaaattatcgatggaatctccgcatgtaaacgttttcagtattttgactgatttggatattcgtcaaatcggtccaaaccatttcaaacactttcctagtactgcaaaggagaacacgatttacctcggcgaaagtaagtccagcactgagaaatattcatcaggcgttataacattattaaccacttttgaaaaactgtttgctaaattgttttccaacataaaaatcaatttgtgcaatttctcatcaattgagtttctatcacaacaatggaagctggcgatttccagaatttgttttgatccgttgttaatcatgtttgaacaagaaaacccaagtgatctagaccagcagatcattgccaaacctttaatatcaggtctggtaactgaaatcatcactgtagcaaaaacaatgggagccagactaaacagtagtcatgataatgaaaactctcttttatctctatggaagaattcttatcattcaaccaataagccacctgcattggtttatcatttcattcatcaaacaacgcctttgaacatcgatatcctgttgttacaaactattttattagccgatgactttggtatcaaaactccgtacttagaatttttatactctgttttgtcccaatttgaaagattgaatagtggcaaatctaaatggtttattaggtcagatgaaaaaactcaaatcttacaaagcttgcaaaaatcacaaaaaaatgaatctgctttacagactcaaattacctccttacaaggtcaaattagtaaactaagacaagagttgcttatgcaggccaagcaacatgaaatggaaactaatgagttaaaggagaaacatcaagtcgctctaaaagcccaggcccaagcccaagctcaagcccaatctcaagctcaaacatcaattgaagcactaacgccaactgaagcaacaaaccaatccgatacaaatgaatataaagcaacaggaactccgaatttgagggacatcgaagatatggcactatatagtgtaaactacggagactctccagtgagatctccaccacctgttgtaagctctcagccacaaatgaactcaccattatcctcacattcacaaactttcggagagaataatggcacgaatgacaaattactacaagaacgcgaattgcaactccgtaaaaaggaattagagctacaagaacgtgaactggagttccagaaaagagcattacagcaacaaagatttaataatagcaataattcaattccaagaaagccttccttccctcaattacagcagtctgcaaacgttcgttctaacagcagaggaatgcatggcaccaatggcgctatgtctcaacctgcatccgccggaaattttgtagacccaatttcttcaagtatcgctgcatatgacccgcaacaacctccttccttacccctacagcagccacaacaatcggtacaagtacaaccttttcactcacactctatcaagcccacaagtaggaagaatagaaatagtaatatgcctaatattggtaatccttccagtataaatatgagtgattttggcagaccaccgaacaattcaagtcaaactcgcttaaattccatgccaacgcatagcatcgtaaaccagaatagattgagatcacaacaatcgaaaaacaaactgaatatgccacatgccaccaacccaaacaatacttttaaccaagtccctgctcctagtttaaacaatcacgttcccacacaaaggcaatttagctccagtaccatgatagaagttacaaataataacaacaaagttaataacagtagtagcaaccctgatatttccaccaactcggtagttcataacgcaatgcaatttacaaatacaaacaacaatacaagtagcactgtggatataaacgatcccaaaaatattgcaccccctcctacaacctctgtttcagccccaagcactccaaccttgtcctcatcaagtcaaatggcgaatatggcttcgcctagtaccgataatggtgacaatgaggagaaaaatggtggtaagaagaagagatttggcctattcaaaaaaaaaaataaatcaaagaaataatatccttcgacagcttaatgaacacgcatgtaaatgttttgtaaacagtttgttttttcgtttttgtatctgttaattttctattatttatttttttagtttttttttg

SEQ ID NO: 3074 - DNA, 1005 bp, Saccharomyces cerevisiae
aaactgggcaaacttgagcaataccaatgtcttcttcttcacaatttaagcagttagaaaagcttggcaatggtacgtatgccacagtgtacaagggactgaacaaaaccacaggggtatatgttgccctgaaagaggtaaaactggattcagaggaaggtacaccctctacggccatccgtgagatctccctaatgaaagaattgaaacatgagaacattgttagactttatgacgttattcacacagagaacaagttgactttggtttttgaattcatggacaacgatttaaagaaatacatggattcccgcaccgtgggcaacacaccaagagggctagaactaaacttggttaaatacttccagtggcaactactgcaagggctggccttttgccatgaaaacaagattctccaccgtgatttaaaacctcaaaacctattaatcaacaagagaggccagttgaaattgggtgatttcggtctggcccgtgctttcggtattccggtcaacacattttcaagcgaagtcgtaacgttgtggtaccgtgctcctgatgtgctaatgggttctaggacgtactccacatccattgatatatggtcgtgtgggtgcattcttgcggaaatgataacgggtaagcctttgtttcctggcaccaacgacgaagaacaactgaaattgatcttcgacatcatgggcactcctaatgagtccctatggcccagtgtaacaaagttacccaaatacaacccaaatatccagcaacgaccaccaagagacctacgtcaagtattgcaaccacacaccaaagaaccgctagacgggaatctcatggatttcttacacggactcttgcaacttaatccggatatgaggctgagcgccaagcaggctctgcatcacccttggtttgcagagtactaccaccacgcttcataacgcagcccgtcagcgaaaaaccgtagccatgtatatataatgataataatcatctataata

SEQ ID NO: 3075 - DNA, 2223 bp, Saccharomyces cerevisiae
cttcaggttgttggttacattggaagagggacttaagctctcacatcatctattttgtttcaagttcgtacattttttgaagcgtgttggacgggacaggttgattacattttttaaacatgtccatcagagatttatatcatgcgagggcttccccttttatatcgttagaattcttccctccaaagactgaattagggacgagaaatttgatggaacgtatgcatcgtatgactgctttagatccactgtttatcacggttacttggggagcaggtggtactactgcggaaaagactctgacattagcttccttggcacagcagacactaaatataccagtttgtatgcatttgacctgtacaaacacagaaaaagccatcattgatgatgcgctggatagatgttataatgcaggaatcaggaatattttggctcttcgaggtgacccacctattggggaagattggctagattctcaatcgaacgaatcaccttttaaatatgcggttgatttagttcgttatatcaagcaaagctacggagacaagttctgcgtcggtgttgcagcatatccagaaggtcattgtgaaggtgaagcagaaggtcacgagcaagacccattgaaggatttggtatatttaaaagaaaaagttgaagctggggccgattttgtgataacacaactgttttacgacgttgaaaaattcttaacttttgaaatgctatttcgggaacggatttcgcaagatttgccccttttccctgggttgatgcctattaactcctatctgcttttccacagagcagcaaagttatcacatgcatctattccacctgcaatactgagtaggttccccccagaaatccaatcggatgataatgccgtgaagtccattggtgtggacattcttatcgaattgattcaggaaatatatcaaagaacatctggtagaattaaagggtttcatttctatacattaaatttggaaaaggctattgctcaaattgtctcgcaatctcccgtcttatcccatatcgtaaatgaatctagcgaagaagagggagaagatgaaaccagtggcgaaataggaagcatagaaaatgtgccaatagaagatgctgacggggatattgtgttggatgattcgaatgaagaaactgtagcaaaccggaaaaggagaaggcattcaagtcttgattcggccaagttgattttcaatagggctatcgtcactgaaaaaggcttacgctataataatgagaatggttccatgccatctaaaaaggctttaatatctatttctaaaggtcacggaactttgggtcgtgatgccacttgggatgagttccccaatggtagatttggtgactccaggtctcccgcatatggtgaaatagacggttatgggccatccatcaaggtaagcaaaagcaaagcgcttgaactatggggtataccaaagacaattggcgatttaaaagatatttttataaaatatttggaaggttcaacggatgcgattccctggtctgacctgggtttatcagctgaaacggcgttaatacaagaagaactaatccaactaaactatcgcggatatttgactttggcatcgcaacctgccacaaatgctacattgagtagtgataaaatattcggctgggggcccgcgaaagggaggttgtatcagaaggcattcgtagaaatgtttattcatagacagcaatgggaaacaactttgaaacccaagctagaccattacgggcgtcggaaattcagttattacgcgggcgattcatctggttcatttgaaacgaacctagacccgcacagctctagcgttgtaacatggggtgtttttcccaacagtccggtcaaacagactacaatcattgaagaagagtcattcaaggcatggagagatgaagcgtttagtatctggtccgagtgggccaagttatttccaaggaacaccccagccaatattcttctaagactagtgcataaagactactgtcttgtctcaattgttcatcacgacttcaaagaaaccgacgagctatgggaaatgttactcgaccaagcctaatatttcactgaatataaatacaaaaatgcgaaaataatgtaatatttaacgtatacataacgggcagaacgcccttctaagaagaagaggcatatgctaatcattggctttccttttcttggagccgcca

SEQ ID NO: 3076 - DNA, 2689 bp, Saccharomyces cerevisiae
taataatacgcataagagtgatctaatccaagtagtacctccttagcgctttttttattatcactataggtcatttggctattagagcgaacagcagaatttgtccttggttttcagagtttgaaaatgctatttggtattaaactggctaacgacgtatatcctccctggaaggattcatatatcgactatgaaaggttgaagaaattactaaaggaaagcgtcatacatgatggccgtagttccgtggatagttggtccgaaaggaatgaatctgattttgtggaggccttggataaagaactagaaaaggtttacacatttcaaatttccaaatataatgctgtcttgcgaaaattagatgatttagaggaaaacactaaatcagctgaaaaaatccaaaaaataaattctgagcagttcaaaaacaccttagaagaatgtctagatgaggctcaaagattggataactttgacaggttaaattttactgggtttatcaagattgtgaagaaacacgataaattacatccaaactatccttctgtaaagtctcttttacaagtcagattgaaagaacttcctttcaacaattcagaagagtattctcccttgttgtataggatctcatatctgtacgagttcttgagatcaaattatgatcatccaaatacggtgtctaaatcattagcaagtacttctaaattatcacatttttctaaccttgaagacgcaagttttaaaagctacaagttttgggttcatgatgataatataatggaggttaaggctagaatcttaaggcatctacctgctttggtttatgcgtcggttccaaatgaaaatgacgatttcgtcgataatctagaatcagatgtccgcgtacaacctgaagcgcgcttgaatattggttcaaagagtaacagcctttctagtgatggtaatagcaaccaagatgttgaaattggaaaatcaaagagcgttattttcccacagtcatatgatccaacaatcactacattatatttcgacaacgatttttttgatttgtacaataacagattgttgaaaatcagcggtgcacctacgctgagattaagatggatcggtaaactgctagacaaacctgacatatttttggaaaagagaacttttacagaaaataccgaaactggtaattcaagttttgaagaaatcagattgcaaatgaaagccaaattcatcaacaattttatttttaaaaatgatcccagttacaaaaactatttaattaatcaactaagagaaaggggtactcaaaaggaggaactggaaaaactttctagagactttgataacatccaaaactttattgttgaggagaagttgcagccagttttgagagctacctataatagaactgctttccaaattcctggagatcaaagtattagagtcactatcgattccaatatcatgtacattagagaggattctttggacaaaaataggcccattaggaaccctgagaattggcaccgtgacgatattgattccaatattcccaacccattgaggtttttaagagcaggagaatattcgaagttcccctattctgtaatggagattaaggttataaaccaagataattctcaaatgcctaattatgagtggattaaagatttaactaattcacatttagttaacgaagttccaaaattttctttgtacttgcaaggtgtggcttcactgtttggtgaagacgataaatatgtcaacattttgccattctggttgcccgatttagaaaccgacatcagaaagaaccctcaggaggcttacgaagaagagaagaaaactttacaaaaacaaaagagcattcatgataaacttgataatatgagaaggttatccaaaatctctgtaccagatggaaagaccactgaaagacaagggcaaaaagatcagaatactcgccacgttattgcagatttagaagatcacgaatcatcagatgaagaaggtactgcattgcccaagaaatctgcagtcaaaaaagggaagaaattcaaaacgaatgcagctttcttgaaaattcttgctggaaaaaatatttcagaaaatggaaatgatccatactccgacgatacagacagtgcctcttctttccaattacctccgggagttaaaaaaccagttcaccttttgaaaaatgccggtcctgtcaaagttgaggcaaaagtttggctcgccaatgaacgtacattcaatagatggttaagtgtaaccacattgctgagtgtattgaccttttctatctataattcagtgcaaaaagccgaatttccacaactagctgatctgttggcctatgtatatttctttttgactttgttttgcggagtatgggcttatagaacctacttaaaaagattaactcttattaaaggtagaagtggtaagcatttggatgcacctgtgggacctattttggttgcagttgtattaatcgttaccttggttgttaactttagtgtggcttttaaagaggccgctaggagggaaagaggattagtaaacgtttcctcccagccttcgttaccccgtacactaaaaccaattcaagattttatcttcaatttggttggggaataagaacatgtatattttttatatacacatatattacacaagtaccagttactatcat

SEQ ID NO: 3077 - DNA, 1421 bp, Saccharomyces cerevisiae
ctgagctaccaaccagacgtaccgcgatctctccgtgtttcgatgtctgtttctaccgcctctacagagatgtcggttaggaagatcgctgctcatatgaaaagcaaccccaacgctaaagtaatctttatggtgggtgccgggatatccacttcttgtgggataccagacttccgatctccgggaactggcctgtaccataacttggccaggttgaagttgccgtaccctgaagcagtgttcgatgtcgattttttccaatcggatcctttgccattttacactttggctaaagagttgtatcccggaaatttcagaccttctaagtttcactatcttttgaaattgtttcaagacaaagacgttttgaagagagtatatacccagaatatagacactttagaaagacaggccggtgttaaggatgatctgatcatcgaggcccatggcagttttgctcactgtcattgtatcggatgtggtaaagtttatcccccacaggttttcaaatccaagctggcagagcatcctataaaggattttgtcaagtgtgatgtgtgcggtgaactggtaaagccggcaatagttttttttggcgaagatctaccggattccttttcggaaacttggttaaacgattcagagtggcttcgtgaaaaaatcacgacatctggaaaacatcctcagcagcctcttgtcatcgtcgttggcacctcactagccgtttatccctttgcgtctctgcccgaagaaattcctcgaaaggtaaaaagagttctgtgcaatttggaaacggtgggcgattttaaagctaacaagaggcctacagatttaatagttcatcagtactcggatgagtttgccgagcaactcgttgaagaattaggttggcaagaagatttcgaaaagatacttacggcccaaggtggaatgggggataactctaaagagcaattacttgaaattgtacatgatttagagaatttgagtttggatcaatctgaacatgagagtgcagacaagaaggataagaagctacagcgtctcaatggccatgacagcgatgaagatggagcaagcaactcctcttcttcacaaaaagccgctaaagaataatgtgttggttgcaatgttttccgtccccctttttttttccttattcatctagcatgcgcggcaatttgatagtttaaaaataaaagagacgcgtaattgagcttggctttcctacgcgtttgacattgcatacatattctttccccccacccccttatagatatcgaaaaatttgtaagctctgacgtgcaattctactttagccaattaggtttgataaaaaatacggcgccagctgacttttttctctttctggataagtactcagaatatatagataagtagaatgggttcccgaaccgtca

SEQ ID NO: 3078 - DNA, 528 bp, Saccharomyces cerevisiae
gtattccgttaagaaattgtaatagagtttatcaagtatgacctgtggtctagtacgaataaggttagctagatttggaagaaaaaatagtccggtctataatatcgtagtggctaattcccgtaaggcgagggatgctaaaccgatcgaggtactaggaacctacgtgccggtacccagcccagtgaccaagagagaattgaagaggggcgttgtacctattaaagacgtgaagcttgattttgatagaacaaaatattggattggtgtgggagcacaacctagcgaaacagttactaaactattacgaaaggctggtatattaaatgatgcatgggccactagtaagaacagcaatgtgaataggaaagttgtatttgaaagaatggaaacattggagtgaaaaagatcggaaaaaaaaaaaaaaagaaaaagaaaggaaagcaaaggaacgtgttttaattgatgcgaggtgtatatgtatatgttgtatatatgttttacttggcgcttttatatctatcagac

SEQ ID NO: 3079 - DNA, 1188 bp, Saccharomyces cerevisiae
acagcgatatctttgggtcaatagagttcctctgctatgactacaaataatgacttctattttgctctactacgcatatctattctccaattattgaaggcacaaggatttgacagggcaaggcccagtctggtggatgtcatgaccgatctctatgcaaaattcttgagtttgttagcatcagaggtcagttctatcgctcaggcaagatgtgatcaggacgatacaattgctttacaagatataactctggctctggaaaatctaggtattgttaagcctacgaacgttctggatgtctatgatgaaaactccgaattatcaagttcacgaggaatggaaaagttcaaggactggtgtatttatagtactcaattgaccgacgcgcgaataactgccttacccacagtagaattactacaaagtgaggaaaaagaatctgatcctttgtcagcaatacctgactatctcaatcaattactgcaaaacaagggtgcgaaacagaaattagaaacaaagaatagaaaaacagagttgatagaagatctaataaataataatggattagatgattggatcaaattagtcattgctagacaacgtataaacatgattgaaagagcttccaaaaaagaatctcaaaatgtaccggctttaccacatattgcaggctataaatcttccattctaagccgccatcaccacactaccataacaaacgaagataggatgccttcggcgatgaccccaagagatgaggatgccttaacagagatccaagaaaatccatttgtaactagcaaactgccgataatgagaaaagaaaataggttagaaaatataactctttcatttgaggatgaggagcttgaatcacttggcgaagtggaaggccctaaccaaaagtctcaagaaaataacaatgaggaaagttttaaagagaacaataaaagtttaacagagtctcctcatggtgatgaccgtgacatatcaatgtttcaattcgactcaaatgttgatactaaatgggcagagcaggaagatatggacagcacatttcaacgtcgaacctcactagattatgggggttacttttaaaacgacatttctgcattttctttcgtcattatctcatccatatttaattaacctcacattattactatatagtgtactttcgcttcttca

SEQ ID NO: 3080 - DNA, 1244 bp, Saccharomyces cerevisiae
tctttatttggtatacgaaagattaaactttcaaagctccaacacaagaatgcacagaacttactctttaagaaatcaaagagctccaacggctgctgagctacaagctcctccaccaccaccatcctcaacgaagtccaagttcttcggaaaggcctctattgcgtctagttttagaaaaaatgcggctggtaactttgggccagagttggctcgtaaattatctcaattggttaagactgaaaaaggtgtccttagagctatggaagttgttgccagcgaacgccgtgaagctgcaaagcaactgtctctatggggtgctgacaatgatgatgatgtttccgacgtaaccgacaaattaggcgtcttaatatatgagttgggtgaactacaggaccagttcatcgataaatatgatcaatacagagtcacattaaaatcaattaggaacattgaagcctctgttcaaccttcgagagatcgtaaggaaaagatcacagatgaaattgcccatttgaaatataaagatcctcaatcaacaaaaatcccagttttagagcaagaactagttcgtgccgaagctgaatctttggttgcggaggctcaattatcgaatatcacacgtgaaaaattaaaggctgcttatagttatatgtttgattcattaagagagctttctgaaaaatttgccctgattgctggatacggaaaggccttattggagctgctagatgactctcctgtcactccaggtgaagctagaccagcgtacgatggctatgaagcttctcgccaaattattatggatgctgaatcggccttggaatcttggaccctagacatggctgcagtcaaaccaactctttcatttcatcagaccgttgatgacgtctatgaagacgaagatggtgaagaagaagaagaacctgaaatccaaaatggagatatccccggtcaagtagtcgaagaagaggaagttgaatggactactgaagttcctgtagatgatgaagcccatgaggccgatcatcatgttagtcaaaacggtcatacctccggttctgaaaacatctgagttttttctaataattaatatattcgaacctttctatattgtgcttgtttttcaccagctcgtgtctacctattattaatttcatctgaatttggttcaagtattgttcggccaatattccggtattgtaatcacctttataattaattgaacaaattttataagacct

SEQ ID NO: 3081 - DNA, 885 bp, Saccharomyces cerevisiae
caacttcgaaactcactaacatgaaacagtttggactggcagcctttgacgagttgaaggatggaaagtacaatgacgtaaacaaaaccatacttgaaaagcaatctgtcgaactaagggaccaattaatggtattccaagaacgactggtagaatttgccaagaaacacaatagcgagcttcaagcttcacctgaattccgctcaaaattcatgcatatgtgctcatctattgggattgatcccctatctttatttgatcgagataagcacttatttacagtgaatgatttttattatgaagtatgtcttaaagttatagaaatttgtcggcaaactaaagatatgaatggaggcgtcatttcttttcaagagttggagaaggtgcattttcgtaagctgaatgttggactcgatgatttggaaaaatctatcgacatgctaaagagcctagagtgttttgagatatttcaaattcgcggcaaaaagtttttacgaagtgttccaaatgagttgacatcagatcaaacaaagattttggaaatatgctcaattctgggctactcaagtatctctttattaaaggcaaacttgggatgggaggctgttaggagtaaatctgctcttgatgaaatggtcgctaacggtttattgtggattgattatcaaggtggtgcagaggcgttgtattgggatccctcttggattacgaggcaactgtgagatagttgacttgaacaggaatggtggatgagcgttaagtatttatcgatgttgtattttattgagcacagttcttaccggtgatctctcgttgttgtaaacattcgatatcatatgcatcataaaagtttacatttagtctttatttgcatcaacgcaaacc

SEQ ID NO: 3082 - DNA, 74 bp, Saccharomyces cerevisiae; identical to SEQ ID NO: 232

SEQ ID NO: 3083 - DNA, 73 bp, Saccharomyces cerevisiae; identical to SEQ ID NO: 231

SEQ ID NO: 3084 - DNA, 73 bp, Saccharomyces cerevisiae; identical to SEQ ID NO: 231

SEQ ID NO: 3085 - DNA, 72 bp, Saccharomyces cerevisiae; identical to SEQ ID NO: 230

SEQ ID NO: 3086 - DNA, 164 bp, Saccharomyces cerevisiae
tgatatgatgatttgttgtcgaccgggcggacatattagtatctgttaaagggtcgccgtctactctcatcgttcttttgtgtacaaattttttaaaggagcgatgttgatggcattatggttctttagtggagaattgatgattggtcacaagacatctgatt

SEQ ID NO: 3087 - DNA, 107 bp, Saccharomyces cerevisiae
tattatgatgatttttttatattcacactgtactagattggtctctttaacgaaggggctaattgatgactacaaaataaaaaataactgatttaatgactctgaaa

SEQ ID NO: 3088 - DNA, 95 bp, Saccharomyces cerevisiae
tcccctatgattaaaaattattaatcatataccaattgttccgactgaatagtggtttaactacatgtcgacaaccctttttcgttaagtttcag

SEQ ID NO: 3089 - DNA, 332 bp, Saccharomyces cerevisiae
gtcgacgtacttcataggatcatttctataggaatcgtcactctttgactcttcaaaagagccactgaatccaacttggttgatgagccccataacctttgtaccccagagtgaggaaatgaaatcgaatttaaattagcttggtccgcaatccttagcggttcggccatctataattttgaataaaattttgctttgccgttgcaattgtgataacttcctttggaatttgttgcgatatttaatggcgcgatgatcttgacccatcctatgtgcttccattttggaaggatagggattcatgggtgggtacaaatggcagtctgacaagt

SEQ ID NO: 3090 - DNA, 172 bp, Saccharomyces cerevisiae
atgaccttccaagtttttaaaagaatacgatgatattatttgcgtttcaaatcgaacaattcttctcggagcgatctgaggttttaatggagatagcggttcctgcgcaacccattgatcttgttacattcttaagaatgacaaggacgcttttataaaattctgattcttt

SEQ ID NO: 3091 - DNA, 74 bp, Saccharomyces cerevisiae; identical to SEQ ID NO: 232

SEQ ID NO: 3092 - DNA, 73 bp, Saccharomyces cerevisiae; identical to SEQ ID NO: 397

SEQ ID NO: 3093 - DNA, 74 bp, Saccharomyces cerevisiae; identical to SEQ ID NO: 401

SEQ ID NO: 3094 - DNA, 82 bp, Saccharomyces cerevisiae; identical to SEQ ID NO: 883

SEQ ID NO: 3095 - DNA, 1187 bp, Saccharomyces cerevisiae
tcaagaatatgtctgccaatgatttcaagcctgaaacgtggacttcaagcgccaacgaagccttaagagtttctatagttggagaaaacgctgttcagttttcaccattattcacgtatccaatttacggtgactccgaaaagatctacggctataaggatctcatcatccacctagcatttgattcagtaacattcaagccgtatgttaacgtcaagtattcagcaaaattaggagacgacaatattgtagacgtggaaaaaaaattactctcatttctaccaaaggatgatgtaattgttagggatgaagctaaatgggtagattgctttgcagaagaacgaaaaacacataatttatctgatgtttttgaaaaagtatcagagtattcgttgaatggggaagaatttgttgtatataaatcgagtttggttgacgattttgccaggagaatgcatcgtcgtgttcaaatcttttcattactttttatcgaagccgctaactatatagatgagactgacccgagttggcaaatctattggttgttgaacaagaaaacaaaagaattgattggtttcgtcactacttacaagtattggcactaccttggagcaaaatctttcgatgaggatatagataaaaaattcagagccaaaatatctcaatttctgatctttccaccttatcaaaataaaggccacggatcctgtctttatgaggctataatccaatcttggctagaagacaaaagtattactgaaattactgtagaggatccaaacgaagcatttgacgatcttcgcgacaggaatgatattcaaagactgcgaaaacttggttatgatgctgtctttcagaagcactccgacctttctgatgagtttttggagtcaagccgaaaatctttaaaactggaagaaagacagtttaatcgtcttgtggaaatgcttcttcttttaaacaattctccatcatttgaattaaaggtaaagaataggttgtacattaaaaattatgatgccctagatcaaactgatccagaaaaggcaagagaagctttacaaaattcatttattttagtcaaagatgattataggcgtattatagagtcgataaataaatctcaaggttaactgtttattaaatatataataacatatttatttgtttaacaagcctgaaataag

SEQ ID NO: 3096 - DNA, 1438 bp, Saccharomyces cerevisiae
gtcgcctctctttctttcttaggccaactagacagccgtagatgaaaatatggaaagatatgatagacagctgagactatggggagcattgggccaagatagtttgaaccggtcccgtgtgtgcgtggtaggacctgctacacctttgctgcaggaagtttttaagaatctggtgcttgccggaatatcatctcttacttggctcaaagtagagtgtgcagttcaatcgggttctctgtttttagcagagcttaaaaaagatcttgagccattggcttctaaacagctagaatatgaggaaaatgaccttagaaagacgttacagcaacctcagtatgattggacccgcttctcggtggtgatcttgacttgtattggtgagcaaactgcgatgctcgatttaaatgagattaggcggcagagaggaacaaagtttccgcctgttctaaacactttcgtctctggattttatggatatatatatctggtactctcagaaacacattttgttttgcaagcacacccagatagtaagaagtatgatttacggttacagaacccttggcctgaactaataaattacgtagatacatttgacctaagtaaaatggatacagccacgttttctggtattccatatactgttttgctcatgaagtgtattgcaaaacttgaaagggatggtaataatgggaggataacgattgatcagatgaagaaagttttagaccaaatttgccttcctttagggaatgatgttatctacgaacccaattatgtggaagctaaacgctatgcttacttggcctgctctcaaaatgattgttgtaaagaactggaagatctgctccgaaatttggaaatatcagattatgggaacgattggcatgatacttataactacgagattctcacactattattgactttgaaaaatattgctaaagagaatggggagctcagctttcaacctttaacgggcactctcccagatatggagtcaacaacggaaaattatatcagactcaagaaactgtatgaagtaaaagcaaagcttgacaagtctcgtgtggaggaaagtttggctcgcagtaaaaaaatagtttcacaggatgtcttggagacattttgttctcattacggggaggtcaggaaaatattgccgccaaaaagtgacttgttaggtatttttagcacctcgaatgcccttttagatgcattagttatggtccaattctgggagcaaccggcagtaactgcagaggataaagatgagtttattggtttacgagtcgacgataactattccgtaatggccttttttggaggtgcagtggttcaagaggctataaagcttatcacacaccattacgttcctattgataacctatttttatataatggcattaataattcatccgcaacatataaaatataa

SEQ ID NO: 3097 - DNA, 3629 bp, Saccharomyces cerevisiae
agataactaaattcatctccaaaaagaacaagagcagaacttcaattagtaaaaccatgaatgtgctatggattatagcactagttggccagctgatgcggctcgttcagggaacagctacctgtgccatgtatgggaactgtgggaaaaagtcagtatttggaaacgaattaccttgccctgtgccacgtagttttgaacctcctgttctttcagatgaaacaagcaaacttttggttgaagtttgtggtgaagagtggaaagaggtccgttatgcctgctgtactaaagatcaagtggtagcactgagagataacctacaaaaggctcaacctttaatttcctcatgcccagcatgcctcaagaattttaataacctgttctgtcacttcacttgcgctgctgaccaaggaaggtttgtcaatattaccaaggtagaaaagtcaaaagaagataaagatattgttgcggaattagacgttttcatgaattcgtcttgggcatctgaattttatgactcatgtaagaatattaaattttctgctaccaacggttatgcgatggacctaatcggaggtggtgctaaaaattacagtcaattcttgaagtttttgggggatgctaaacctatgcttggtggatccccctttcagattaattacaagtatgatttagcaaatgaagaaaaagaatggcaggaatttaatgatgaggtttatgcttgcgatgatgctcaatataaatgtgcgtgttctgattgtcaagagtcttgcccccatttaaaacctttaaaagatggcgtgtgtaaagttggccctctgccatgtttttccctttctgttctgatcttttacacaatctgtgcactttttgcatttatgtggtattatctctgtaaaagaaaaaaaaacggggcaatgattgtggacgacgatattgttccagaatcaggttccttagatgaatcagagacgaatgtattcgaaagtttcaataatgaaactaacttttttaatggtaaactcgctaacctatttacgaaagtgggacaattttccgttgaaaacccctacaagatattaataaccactgtttttagtatctttgtattcagtttcatcatatttcagtacgctactcttgaaacagatccaattaatttgtgggtgagtaaaaattctgaaaaattcaaagaaaaagagtacttcgatgataattttgggccattttacaggacagagcaaatatttgttgtgaatgagacaggccctgtgttatcatatgagacacttcactggtggtttgacgttgaaaattttattacggaagagctacaatcgtcagaaaatattggataccaagatctctgcttcagaccaacagaagattctacatgcgtaatagagtcttttactcagtattttcagggggccttaccaaacaaggatagctggaaaagggaactgcaggaatgtgggaaatttcctgtaaactgtctacctactttccagcaacctctaaaaactaatcttcttttcagtgacgatgatattctcaatgcgcatgcgtttgttgtaacacttctattgaccaaccacactcaatcagctaatcgctgggaagaaagattggaagagtatttattggatttaaaggtccccgagggcctgaggatcagttttaataccgaaatatccttggaaaaagagcttaataataataatgatatctcgaccgttgcaatatcatacctgatgatgtttttatatgctacatgggccttgaggagaaaggatgggaaaactaggttgttacttggaatatctggtttactcatagttttggcttctattgtttgtgcagccggatttttaactctttttggtttgaagtcgacattgatcatagcagaagtaataccgtttctaattttagcaataggaatagataatattttcttgattacacatgagtatgatagaaattgcgagcaaaaaccggagtattcaattgatcaaaaaataataagcgctatcgggagaatgtctccttccattttaatgtcattgctatgtcaaaccggatgcttcttgatagctgcatttgttacaatgccagctgtccataattttgctatatattccacagtttctgttatattcaacggagtattacagctaacagcgtatgtgtccattttgtctctctacgaaaagagatccaattataaacaaattaccggaaatgaagaaactaaggaatcatttttgaaaacgttttattttaagatgttaacgcaaaagaggctcataatcattatcttctcggcttggtttttcacatctctggttttcttaccagaaattcaatttgggctagatcaaacattggctgttccacaggattcctacctggttgactattttaaggatgtttatagcttcctaaacgtaggaccaccggtttacatggtcgtgaagaatttagatttgactaaaagacaaaaccaacagaaaatatgtggtaaatttacaacttgcgaaagagactcattagctaatgtactggagcaagaaagacacaggtcaacaattacggagccattggctaattggctggacgattatttcatgtttttaaatcctcaaaacgaccagtgttgtagattaaagaagggaacagatgaggtttgtcctccctcttttccaagtagacgttgtgaaacttgtttccagcagggttcttggaattacaacatgtcagggtttcctgagggcaaggacttcatggaatacctaagcatatggattaatgcgcctagtgacccctgccctctaggtggtcgtgcgccatattcgactgcgttagtttataatgaaacgagtgtgtctgcgtcagttttcagaacagctcatcatcctttgagatcccaaaaggactttatccaggcgtatagtgatggagttaggatatcaagttctttccccgaactagatatgtttgcatactcgccgttttacattttttttgttcaatatcaaactttgggaccattgacgttgaagctaatagggagtgccattatcctaatttttttcatttcatctgttttcttgcagaatatacgcagctcattcttactggctttggtcgttaccatgattatcgtagatattggtgctttgatggccctactaggtatctcactcaacgctgtcagtttagtcaatttaattatttgtgtcggtttgggtgtcgagttttgtgttcatattgttagatcatttacagtggtccccagtgaaaccaagaaagacgcaaactcaagagttctctattccttgaataccataggtgagtccgtcatcaaaggtataactctaaccaaattcattggagtttgtgtacttgcattcgcccaatcgaaaatatttgatgtattttactttagaatgtggtttacactaatcattgtagcagcattgcatgctctcctatttttacctgctttactttcattgtttggtggtgaaagctatagggacgattccatcgaagcagaagattagccatagcagattatactatattttacgtagtgaaaaaataggtaaaaattcgttaattat

SEQ ID NO: 3098 - DNA, 785 bp, Saccharomyces cerevisiae
ttaggcatttaggttttgtttgtgagctggcttgctaattttgagtactgtgcatcattgttccaggatgtcttctttatcgctatatactgttcaggctgttttaatactagatcagcaaggagaacgaatttatgcaaagtattatcaacctcctcatagatctgatgaaggacaccaattgctcttcaattcggtgaagaagcaaaaagagtttgagaaacaactataccgtaagactcacaagcaagattcggagattttaatcttcgaggatcatttagtcctttacaaagaatacattgatatcacgatatatttagttgcttcgctggaagagaatgaaattgttcttcagcaaggattttcagcaatcagaggagctttggatttgattttgaactcaggaatggacaaaaaaaacatccaagaaaactatgatatggttttattagctattgatgaaaccattgataatggtgttatcctcgaaactgactctaacactattgcatccagagtttctaaaccacctacgaacgaaccccaaatggcattagatttggataagggtttcttaggcgcgtggggtttcgcaaagagcaagtttcaagaaaggttacagcaaggcttatgatcacaaggcaaagcggatagaagaaaattttagctggtcttatatggtatatatgcagtgtcttactttctcccttccatatatatgtatctacttatatatataagtatatgttgctcatttagaaatgattgtcacctcatgctaa

SEQ ID NO: 3099 - DNA, 3913 bp, Saccharomyces cerevisiae
tcagagaagagttttagtttgaaaaggttcaacttatttttttactgattgaattcaaccaggtaatttctagattttgaacagcatctcgcgaattgaatcagcaaatctcagagttcatcatggatcaagacaaagttgcttttcttttagagctggaggacaagctggctaaaattcgttcccaagtaaactctaaattggagaatcaaaagcatattgctataatattaactgccgttgaggaaaatattgcaggtcaagctacaaatgatgtttcaaaaaacattgtaaattatatcatttcctttatgtcactattggatcaagcagtagacccatctactcatgaaataaaagatattcaattggcttcctcatctacatatcttctagatctgatatttcattattcgcctaaggtattattaagatcgaagttttctgaaatcctaacgaaaattgccccatgtatcactgcagaaaaggctaatgcccctctaattagagctgctattggttgtttagaatctcttcttattgctcaagatgcacaagcctggaacaatacttatgatctaaacgtcactccaaaaagaggtttgcagggtatacttgaactttctttagatgtaagaccaaaagttagaaagagagcgctagatgcagttcatgcggtcttattaaaccctcctgttgcaccaactgcagagcatgtagcggcagtttttgtagcagatttctgtgacaagcagttagcaggtattttaaatgatctctcgaatttatcaaataaacaattgaaagcacagaaaacaaaggaagacattaacgctagtgtcatgcgctctctaaggttgattacttcagtcgtctctactggacagtggccatcttcacagattgagcctctttgtgatgtactattgggagtcaccaaaagctcagagcaatatctcgtttctgcatcatttgaatgttttgaaagcatgttcaaaacaatggcagaaactaccatttcttctggattggctgaaaataagtacctaagagtcttggataccatttttgcattaaaaccctcaaatgtcgatacattattaaccaagtcctggattgctgtggtcattaagggtatgtccacttacgcaacacatcaaccactgaaagcgctacgtaaaattcctggtgtatttcacattatgtgcacatatttagctagtgaaactccagaagtgtaccaagctgcctctcaatgtcttatctcaatcctttctgagtctgttaaagatgatttgttattgtatacaccaagtgtggatgagaaagttttcaaaaacgtagatgaaatcatctctcaaattgcgaaaacatttatcgactttttatccattagatattcccattgttccagagaaattcttaagattttggtggcagcattcaacaaattcagatatagatctaatcctcactttttaaaatcactgaaaatagtcgatacatggagagtaaatgaagaacagtttatggatttgagaaatgaaatcgaattagtaatcggagcctccatttctgctatgggccctgaaatgatactcgcagaagcacccctgaatttagacaatccatcttccgaaagacctggcagggcttggttgttaccgcttattagagattatacgaaaaatgcgaaccttgcaacttttcaaaacgaattggcaccatacattaaaagttttcaatctaagttcgataaagtcccggaagaatctattcaattgagagtttttcaaactattgttgaccaaatctggtctacacttccacggttttgtgaactcccaatggacttgagggaatccttcactgacgaatttgcctcagaactatcttctttattatacagcgaggttgagttaagaactacaatttgtcatgctttaaaggtcttggcagaaagcaatgtttcatatgccgaagagtcctcttctcacaacgttttattgttgcaacgtttccccatttctgaagctcaaaagaatatagaatacctttcaaccaaatcaacgaatcttctagcagttttgttcaatgtttatactcaaaccactccaaatgcaaggagttatattttggaaacgattgatcaatatttaaagattacttcaaaggaagatttggagaaaactttcaacaacgtatgtggtcttttgaagaattctatgaatgaagaaagtagcggaaatgtgaacaaagaaaagaaaaagcctcaattgacagcgacactattggacttaatcatatgtatgataacatacttacctgtctcgtcttattctgctttattctcaatgtttagcctcaccgtaaattctgctgacgcgctaattcaaaaaagagcttatagaattattacaaagctttctgagttgaaatcgggatcaacagctgtcgcccaattcatttcggatattgagaatgtcatggtagatagcgcctcctctgttcaaacatctgctaaagctgcaagattaacagcaattaaaaccatagtagaattattacctttagatcatcttgatttcattgttagaaccgtcgctgaggttattttgagtacaaaggatgtgaatgaaaaatctagagagaccgcttttgatactttaatttgtatgggaagaaaaatgaatgagccaaatggtattatcaaattattccaaataccaggttatgatcctaccactccagatcaatcgtcgtcaatatcagagttttttaagatcatttctgccggtcttattggtgaatctcaacatatggttagtagttcaattacgggttatgcttgtttagtttttgaattcaaaaatgaactcgattccggtatactaatggatatatatgacaccattgaattgtacttaacttctaactctagggaaattgtaaaaagcgccattgggtttaccaaggtttgtgttttggggcttccagaagaactgatgaggccaaaggtgccagagttacttctaaagttattaagatggtctcacgaacacactggtcatttcaaagccaaagtcaagcatattattgaaagattaataaggagatttggatatgactacattgaagccaacttccctgaagaagataggagattattaacaaatataagaaagatgcgcaataggaataagcgtaaagatgaagaagttactactggagttagtgatgtagctgccacaaagggttcaagatttatgtctgcattcgatgaagctgtttatgggtctgatgaagaaaatgataatggatcagatcaggaggaaaatgttgctggtggcaaaatgaagaatggggcaaagcaatttattgtagaatccggtgacaacccactagatttgttagattctcaaacactagctcatatatcatctaccagaccaaagaaattcaataagaatcaaaatagagcaaggtttaatgatgatgcgtttaactttgactcagaaggaaaactcgttgtcaaggggcaacctaaaccctctactaatgtagacgatccattgagtgctgtgacaagcggaatcaatgcgtatctagaggctgtgaaaagtggtcctgtaagaggtcaaagaaacaagctgaaattcaggaaaaatggaaaggactctgatgaatttggcgatgatgatgatggtgaaaaggatagtaggctaatgagaggaagagtaaatcaaggtaacaagattggcaaacataataagaaaggtccaaagttcaaatctagaaaaaaattatagaagattgaaactgagcaatatggctaattacacacctggagaaaaaatcagatatgtatatataagaatattataatactgtatattaaaaatgattaaaataa

SEQ ID NO: 3100 - DNA, 960 bp, Saccharomyces cerevisiae
ttattaagaaaaaagaaaaaaaaaaaaaaaaaaaaaaagaaaaggaaaaaggaaaaagataaaccaatcatacaatctttacagaaagggagtactgagaagaaggccaaaatactgcagagcatacatactaccgagtggatggaatgtctttttcatctatcttatcacaggatatcacagatgacattacaccaccagcgtattccgccaccttggggtcgagagaacagattgttttcagagcttaccaaaatgaaccttggttggctggtactgcttcgaatcttatcttagataaaaaacttgttattgtagacagagaactgttgttccaggtgttgatggtagagaatatcaccaaatccaagctaacacagatcgatgatataaaaaccaagctggatccgaaaaaacagaaagtggatagactacgatcaggcgcgcaaggaaatggcgctaagaagtacgaggtcatcactcaagtggacatggaagatgacgggaatgtggcggataacaactgcgccaaggaaaataatagcaacaataatagcagtgccgccaagaataaagcagtgtttaaattgacactacaaagtaagtcgggcgacgttttttttgctatcaactcgactccaatatcttggagctcttgcatgctgggttctaaaattgtgatactgccgggaactgtgttcaataggggcgttttcatattgaaggactcacaagtcatttttctcggcggcattaatagagtttggaatgaaaatagagatcagaaattttgtgattatttggaatctaaattacaacgtgacaaacaacttgtaaatggcggctccaagaaaaggaaagccaatgattagcatatgcctcttcttcttagaagggcgttctgcccgttatgtatacgttaaatattacattattttcgcatttttgtatttatattca

SEQ ID NO: 3101 - DNA, 1333 bp, Saccharomyces cerevisiae
atcatatatatttatacagattagacgtactcaaaatgtctcagaacgtttacattgtatcgactgccagaaccccaattggttcattccagggttctctatcctccaagacagcagtggaattgggtgctgttgctttaaaaggcgccttggctaaggttccagaattggatgcatccaaggattttgacgaaattatttttggtaacgttctttctgccaatttgggccaagctccggccagacaagttgctttggctgccggtttgagtaatcatatcgttgcaagcacagttaacaaggtctgtgcatccgctatgaaggcaatcattttgggtgctcaatccatcaaatgtggtaatgctgatgttgtcgtagctggtggttgtgaatctatgactaacgcaccatactacatgccagcagcccgtgcgggtgccaaatttggccaaactgttcttgttgatggtgtcgaaagagatgggttgaacgatgcgtacgatggtctagccatgggtgtacacgcagaaaagtgtgcccgtgattgggatattactagagaacaacaagacaattttgccatcgaatcctaccaaaaatctcaaaaatctcaaaaggaaggtaaattcgacaatgaaattgtacctgttaccattaagggatttagaggtaagcctgatactcaagtcacgaaggacgaggaacctgctagattacacgttgaaaaattgagatctgcaaggactgttttccaaaaagaaaacggtactgttactgccgctaacgcttctccaatcaacgatggtgctgcagccgtcatcttggtttccgaaaaagttttgaaggaaaagaatttgaagcctttggctattatcaaaggttggggtgaggccgctcatcaaccagctgattttacatgggctccatctcttgcagttccaaaggctttgaaacatgctggcatcgaagacatcaattctgttgattactttgaattcaatgaagccttttcggttgtcggtttggtgaacactaagattttgaagctagacccatctaaggttaatgtatatggtggtgctgttgctctaggtcacccattgggttgttctggtgctagagtggttgttacactgctatccatcttacagcaagaaggaggtaagatcggtgttgccgccatttgtaatggtggtggtggtgcttcctctattgtcattgaaaagatatgattacgttctgcgattttctcatgatctttttcataaaatacataaatatataaatggctttatgtataacaggcataatttaaagttttatttgcgattca

SEQ ID NO: 3102 - DNA, 1838 bp, Saccharomyces cerevisiae
ggtccgattatattgctatcttgtgatacttctcctttctctcaacaatgactggcgacggtagtgcacatatttctaaaaacaatcaaaatcaacacaaagatcgcttcaagtttattgtgaatgataaaagtattctaggacctcaatggttaagcctttaccaaacggatgggaaagtaacattcgcaaagtcccacttcgagcaagcaatgatgaacgttattagagaaccaaatattaactctactgtcatattaagagcggatattttgaaagagatcaatcatgctgcagaagctgggtctgagccaaaatttgacgagtccgtattaaaaaagtttgagatcgataatggtaatgaaagcggtgaagaagatgtcaagaagataaatattgaagatttaaacataaggtcgtgtgaaacatctgagagtttaaaattgtcacccgttcatgaatttgtaagaaggatcattcctaggaatttttacaaagatgctatcataaaccaaacatgtttaatcctaaatagcaaagaccctaattttcaggagacctcattgattgtatatacgccgcacattaactctgagaaagactgtccgttttatattccaagaacgcaaagtgtaggcattttgttacaccagtcagttctttctgtacactacattcccttccccgaggataaaactgcctttacagatgaatctgagcgtgttgtaagaaccgcttataggttattacaaactgctaacaaacactcaaagggtgtgatgcagggttatgaaaagagggtcaatcacgatcaagtggtaaataaagtcaattttcagaacacatacattgttttgaagaaaaaatactccaagttcctggtggagaattgggcagagtctacagacccaaaaaaacatgtttttgaagacatagccattgccgctttcctgattgaattatggattaaagtgtacggtccagacttccgttcaaaaatgcaatttagagatttgggatgcggcaatggtgctctttgttatattttactgagtgaaagtattaaaggtctcggcatagatgcaaggaagcgcaaatcgtggtctatctacccgcctgaagtgcaatcatcgttaaaggagcaagttataataccttctatccttttaagaccccatcctgctttgaaaagacaagtacctcatttggaacacaatgggagatttttcccagtcaaggtgacgcacgaagtgattgcccccgcaaccgtcgtgtattcaagtgaggacttactaaaatctccgcaggtcaatacagcagagttcccaccagatacttttattataggtaaccactcagatgagttgacttgctggatcccattactaggtcatccttatatggttataccttgttgctctcataatttttctggccagagagttcgttttaacgtaaggaaacgttcgcctaggtcaaatgaaatcaaaaaccagaataacagtaagagcacctactctggtttggttgatcacgttgaatatatttcatctcgtgtaggctggaaagtagagaaagagatgttaaggataccaagcacaagaaatgcagccatcataggtgtagaaaatgcaaccttaaagcattttccaacgcaagcagtgtacgatatgatttgggaagacggtggagctgaagggtggattcagaacacaatgtccttattgaaaagaaacccaagaaaccattaaatagatgtatcatctattatttgtatgtgcgttcatttatagactaattagaatatcatacgtacatataagactatacaatttatc

SEQ ID NO: 3103 - DNA, 3216 bp, Saccharomyces cerevisiae
actgggcttttttaaacatacccataacttttttttttttcatttttcgttgctgtgtgctagtacaatttaagcaaaaggaaactgttttgcgttatgtcttccactgaagcaaagcaatacaaggagaaaccctcgaaagagtacctccatgccagtgatggcgatgaccctgcaaataattctgccgcttcttcgtcatcttcgtcttctacatcaacttccgcctcgtcatcggctgcagccgttccacggaaggccgcagccgcttctgccgctgatgattctgactcagatgaagatatagaccaattgattgatgaactacaatctaactacggtgagggtgatgaatctggtgaagaagaagtacgtactgatggggtgcacgctggccaaagggttgttcctgaaaaggacctttctacggaccctgcgtatggtttgacttcggatgaagtcgccaggagaagaaagaaatatgggttaaatcaaatggctgaggagaatgaatcgttgattgtgaagtttttgatgttcttcgtagggcctattcaattcgttatggaggctgctgctattttggctgccggtttgtctgattgggttgatgtcggtgtcatctgtgctttactgctattaaacgcatctgtcggatttattcaagaattccaggcaggttccatcgtagacgagctgaaaaagacgttggccaatactgcaacagttattagagatggccaattgatcgaaattccggctaatgaggtagttcctggtgagattttgcaattggaaagtggcacaattgctcccgcagatggtcgtattgtcactgaagactgttttttgcagatcgatcaatcggccatcactggtgaatccttagccgctgaaaagcattacggtgatgaggtgttctcctcatccactgtgaaaaccggcgaggcttttatggttgttactgccactggtgacaataccttcgtcggtagggctgccgccttagtggggcaggcttccggtgtagagggccatttcactgaagtattgaatggaattggtattatcttacttgttctagttatcgctactttgttgttggtctggaccgcatgtttctatagaacggtcggtattgtaagcattttgagatatactttgggtataaccatcattggtgtcccagtcggtttgccagcagttgttaccacgaccatggctgtcggtgcagcttacttggctaagaagcaagccattgttcaaaagttatctgctattgaatcccttgctggtgttgagattttatgttctgacaagactggtactttaaccaaaaacaagttatctttacacgaaccctacactgtcgaaggcgtttctccggacgacttgatgttgaccgcttgtttagctgcctctagaaagaagaaaggtttggatgctattgataaggcttttttgaagtcattgattgagtatccaaaagctaaagacgccctgaccaagtacaaagttttggaattccatccgttcgaccctgtctcaaaaaaggttaccgctgttgtagaatccccagaaggtgaaagaattgtttgtgtcaagggagccccattgtttgtcttgaagactgttgaagaagatcacccaattccggaagatgtgcatgaaaactacgaaaataaggttgctgaactagcttctagaggtttccgtgctttaggtgttgctagaaagagaggggaaggtcactgggaaatcttgggtgttatgccatgtatggacccccctagagatgacaccgctcaaacaatcaatgaggccagaaaccttggtttgagaatcaagatgttaaccggtgacgctgttggtatcgcgaaagaaacgtgtaggcaattaggacttggtacaaacatttataacgcagaaaggttaggtctgggaggtggaggtgatatgcctggttcagagttggctgattttgttgaaaatgccgatggtttcgcagaagttttcccacagcataaatacagagtcgttgaaatcttgcaaaacagaggttacttggttgctatgactggtgatggtgttaacgatgccccatctttgaagaaggctgatactggtattgctgtcgaaggtgctaccgatgctgccagatcagccgctgatattgttttcttggcccctggtctctctgctattattgatgccttaaagacttctagacagattttccacagaatgtactcctatgttgtttatcgtattgccctatccttacatttggagattttcctgggtttatggattgctattttaaacaactctttggatatcaatttgatcgtttttattgctattttcgcagacgttgccactttaactattgcttatgacaatgctccttatgctcctgaacctgtgaaatggaacctaccaagattatggggtatgtctattattttgggcatagttttagctataggttcttggattactttaaccaccatgttcttgcctaatggtggtattatccaaaattttggtgccatgaatggtgtcatgttcctgcagatttcactaactgaaaattggttaatttttgtcactagagctgctggcccattctggtcttccattccatcgtggcagttagccggtgccgttttcgccgttgatattattgctaccatgtttaccttatttggctggtggtctgaaaactggactgatattgtgtcagtcgttcgtgtctggatttggtccattggtattttttgtgtattgggaggattttactatattatgtccacgtctcaagcctttgataggttgatgaatggtaagtcattaaaggaaaagaagtctacaagaagtgtcgaagatttcatggctgctatgcaaagagtttctactcaacacgaaaaaagcagttagtaattttaaacatcatccatctgattttttttcttattgatctcctttttgttattcctcattttcatttcaatttgtcgataccaaggaagccaagacgttataaaagaacacggtcaacaaaaatcaaattaatgcctcttcaattgtgctctgtttgataccttcgatatgatgttacagttttaaagtttacacacaagtttttagactaagtggcatcatatctgtcaattttatcacacacacacacacacacacacacaaacaaacata

SEQ ID NO: 3104 - DNA, 660 bp, Saccharomyces cerevisiae
tctatatgtgcatatgaaactggcgcaagacatgaatgtagatgaaatatttctcaaacaagcggcagaagctatagcggtaatctcatcaagtcccactcatacggaccccataatacgagagctactccacagaattcgacaatccagcccattgagcgcagttataccagcaccagaaaatgttttaaaggctggggagccggaaaatatggctagaggtcttataaggattccagaaacacaaacaaaaagaacaggaggtaacaaccatagcaaggaaggcgcacagctctacagctgtgcgaaatgtcagttgaaattcagcagaagttctgatctgagaagacatgaaaaggtacactcactcgtgctgccgcatatttgctcaaactgtggcaaagggtttgccaggaaggatgctctaaaaagacattctaacacactgacctgtcaaagaaacagaaagaaactaagtgaaggttcagacgttgatgtagatgagctcatcaaggatgcgataaagaatggtaccggcctgttgtaaggctagaggaaaacgtatttgtctccatcagcacacctacacatacatatatagatagatatatactttagccattgagataagtagaataaaaaaacgttgtaatattccga

SEQ ID NO: 3105 - DNA, 1117 bp, Saccharomyces cerevisiae
aatatttaaagaatacggggtagaattattcacgctgggggatgctgaaagaggagtataatttgagcggtgctgataacatggcatctgctgagttgtcatttaaaaagcaaaaagtggtattgaaaaagttcatgatagcgcaagtgactaaggggattatgcagcggtatgcgagcctattagttaccatgcctagtgatgatgacaatgcaattattggcacaaatcatttgaaaacaaccaaatttttagaaataatcctacacagagccaaatcatcgcatttacagttcaaaaaggtctgttgcattgtcatcaagtttctagattgctgctcgaaggaaactaactacatgaagtttttaaagttcagcttacacaaactatttgtagctgctttcatcttaagtgtgccaaatgttgtaggcgatgaccgcgacaggattaccacgagggatgaaacctatcatctctattcccagataacaggcttgccactggaagaagtgataaattgttgttctattgtgaggcctgtacttattcggcggagtagacaacaacgcaggcaaatgttatctcgacgtgaacaacattcgtacttcctcagaagttcttttatgaactccaattcatcagcatcaccttttttctctaccaataggtcagctgatgatctacatgtacatacaagggcatactcgcttcatagccattccgatggggaaggccaagataggcggtcggaacatgaagaaacgcatagcatgggggctgatgccgatacatatcgacaaactacgtttatcccagacacaccaaatggtttgcattctagatcattaattgagtgtgggatcgaacccacccaagtaagtgactctggtgaatggtcgggtcaaagtaacggatatgttttggtgacagaattacaggagtttaacaaaatgggtaaaaagttagtacaagaagcttttaggatagtttaataaagtatggtttgtcgttttgttcatcattcaagggtcatttttatttccatttatgatttcttgagtacaaaaggcaaaaaaaacatgtataattatacacaagaaaaaaaaacaaaacaaaa

SEQ ID NO: 3106 - DNA, 720 bp, Saccharomyces cerevisiae
tcgaagaagtaacttagcgtttcttccgttgagcagagcagtataataatccttcaaattctttaggttacggggttttcctgttgcgatgaccgaagaaactattactatagattctatttcaaatgggatactgaataacctgttaaccacattgatccaggacattgtagctcgggaaaccactcaacaacaattgctgaagacaagatatccggatcttcgcagttattatttcgacccgaacggatctctcgatattaatggactacagaagcaacaagagtcctctcagtatattcactgtgagaattgtggcagggatgtgtccgcaaacagactagcagctcatttacagagatgtttgagtaggggtgctagacgttgacactaggtggtggtttatgggtaattgaaaaggcacagacagattttagcccatttcttgtgggcataggttcataaaaaaagcaagattcttacattttatgcggcatatctgcacatagaagttcatgtagttatgtggtaacatctcaaagagagaaggcgaaaactgttttagctattaactacatgtttttataatagcacctcccatatatgatgccaaatgataccttgcattccgttatgtggaagggttacacataagtacgctataacaatgcattcaattttctacatatcagagtaatatgctgcaacatcacacccata

SEQ ID NO: 3107 - DNA, 1463 bp, Saccharomyces cerevisiae
tccttgttattgtattttctgttattagagcatacagaacatagaaactcaagatcagatacagtttttgcacgccatgtctcaaggtactttatatgctaacttcagaattagaacttgggtcccaagaggtcttgtcaaggctttgaagctggacgttaaggttgttacgccagatgccgccgctgaacagttcgcaagggactttcccttgaagaaggttccggctttcgtgggtccaaagggttacaagctaaccgaggcaatggcgattaactattatttagtaaagctttcacaggacgacaagatgaagactcaacttttaggtgccgacgatgacttaaatgcccaagcgcaaatcatcagatggcaatctttggccaacagtgatctgtgcatccagattgccaacaccatcgttcccttgaagggcggcgccccctacaacaagaagagcgttgattctgcgatggacgctgttgacaagatcgtcgacatcttcgagaacagattgaaaaactacacctatttggctacggaaaacatctccttggccgacttggtggctgcctcgattttcaccagatactttgaaagcctgttcggtactgaatggagagctcaacatccagccatcgtgagatggttcaacaccgttagagcctcacccttcttgaaggatgaatacaaggatttcaagttcgctgacaagccattgagtccccctcaaaagaagaaggaaaagaaggccccagccgccgctcccgccgcttcgaagaagaaggaggaagccaagccagctgctaccgaaactgaaacttcttccaagaaaccaaagcacccattagaattattgggcaagtcaactttcgttttggatgactggaagagaaagtactccaatgaagacaccagaccagttgctttaccttggttttgggagcactacaacccagaagagtattccctgtggaaagtcacctacaagtacaacgatgaattgactttgactttcatgtccaacaacttggtcggtggtttcttcaacagattgtccgcctctaccaagtacatgttcggttgtctggtagtctacggtgaaaacaacaacaacggtattgttggtgcagttatggttaggggccaagattacgttccagctttcgatgtcgcaccagattgggaatcttacgactatgcaaagttggatccaactaacgacgacgacaaagaattcatcaataacatgtgggcctgggataagccagtttccgtcaatggcgaaccaaaggaaattgttgacggtaaggtcttaaaataatctcttcgtactatccttcatgtcgccttttattataaagtatgctaggtagttttatctatatcttatttatgacgcaatatagggtaacagagtttttctgctctgaaacttccgcagaaaaaaaatcaagttttcc

SEQ ID NO: 3108 - DNA, 652 bp, Saccharomyces cerevisiae
tcaaggccacaaaggtatctgtttactttttgactttagcaaaaatttgaggaaatcagacaatgtttctcccaaaattcaatcccataaggtcattttcccccatcctccgggctaagactcttcttcgttaccaaaatcggatgtatttgagcacagagataagaaaagctattgaagatgccatcgaatcggctccagtggttcttttcatgaaaggtactcctgaatttcccaagtgtggattttcaagagcaaccattggattattaggaaatcaaggcgttgacccggccaaatttgcggcttataatgttttagaagacccagagctacgtgaaggtatcaaagagttttcagaatggccaactattccacagttatatgtaaacaaagaattcattggtggatgtgatgttattacaagtatggcacgctctggtgaattggccgatttgctagaagaggcacaggcattggtacctgaagaagaagaagaaaccaaagatcgttgattttgttaccactggaagcaaaataggaactggtggccgaacactttaatactcgtgtgcataataggcctttacgatccatatttatatatgcatgtacatttgctatttttttaaagatttgtaatgtattctca

SEQ ID NO: 3109 - DNA, 1659 bp, Saccharomyces cerevisiae
ctttaacatacacaaacacatactatcagaatacaatgactaagctacactttgacactgctgaaccagtcaagatcacacttccaaatggtttgacatacgagcaaccaaccggtctattcattaacaacaagtttatgaaagctcaagacggtaagacctatcccgtcgaagatccttccactgaaaacaccgtttgtgaggtctcttctgccaccactgaagatgttgaatatgctatcgaatgtgccgaccgtgctttccacgacactgaatgggctacccaagacccaagagaaagaggccgtctactaagtaagttggctgacgaattggaaagccaaattgacttggtttcttccattgaagctttggacaatggtaaaactttggccttagcccgtggggatgttaccattgcaatcaactgtctaagagatgctgctgcctatgccgacaaagtcaacggtagaacaatcaacaccggtgacggctacatgaacttcaccaccttagagccaatcggtgtctgtggtcaaattattccatggaactttccaataatgatgttggcttggaagatcgccccagcattggccatgggtaacgtctgtatcttgaaacccgctgctgtcacacctttaaatgccctatactttgcttctttatgtaagaaggttggtattccagctggtgtcgtcaacatcgttccaggtcctggtagaactgttggtgctgctttgaccaacgacccaagaatcagaaagctggcttttaccggttctacagaagtcggtaagagtgttgctgtcgactcttctgaatctaacttgaagaaaatcactttggaactaggtggtaagtccgcccatttggtctttgacgatgctaacattaagaagactttaccaaatctagtaaacggtattttcaagaacgctggtcaaatttgttcctctggttctagaatttacgttcaagaaggtatttacgacgaactattggctgctttcaaggcttacttggaaaccgaaatcaaagttggtaatccatttgacaaggctaacttccaaggtgctatcactaaccgtcaacaattcgacacaattatgaactacatcgatatcggtaagaaagaaggcgccaagatcttaactggtggcgaaaaagttggtgacaagggttacttcatcagaccaaccgttttctacgatgttaatgaagacatgagaattgttaaggaagaaatttttggaccagttgtcactgtcgcaaagttcaagactttagaagaaggtgtcgaaatggctaacagctctgaattcggtctaggttctggtatcgaaacagaatctttgagcacaggtttgaaggtggccaagatgttgaaggccggtaccgtctggatcaacacatacaacgattttgactccagagttccattcggtggtgttaagcaatctggttacggtagagaaatgggtgaagaagtctaccatgcatacactgaagtaaaagctgtcagaattaagttgtaatgtaccaacctgcatttctttccgtcatatacacaaaatactttcatataaacttacttggtcttacgtcataaataaatatgtatacatataaattaaaaaatttggttttatattttta

SEQ ID NO: 3110 - DNA, 1619 bp, Saccharomyces cerevisiae
gtaatttctagcatccactcaatttcgtgattagcttttggcgcataactgattttttgctttagcacatcacagctagaataaacttccaaaaatcacccgcttgcaatgctgtccattttaagaaattcggtgagactaaattcaagggctcttagggttgtgccatctgccgccaacaccttaacatcggttcaagcatccagaagacttttaacaagttattcaagttttttacaaaaagaaacaaaagacgacaagcctaaatccattcttacagatgatatgctgttcaaggccggtgttgacgtcgatgagaagggccaaggcaaaaacgaggaaacatcaggagaaggaggagaggacaagaatgaaccttcttccaaaagtgaaaaatctagaagaaaaagacaaacttctacagatattaaaagagaaaagtatgctaactggttttacattttttcgttgtctgcgttgacaggtactgcaatctacatggcaagggattgggagcctcaagagtctgaagaattgaagaaagacatcgataatggctacactttatcacttatgtataaaagattcaaggccaggttcaactcaatgttcacctacttccaagagccacctttccctgatttactacctccaccaccaccaccaccgtaccaaaggccattaactcttgttatcacattggaagattttttggttcattctgagtggtctcaaaagcatggttggagaacggccaaaagacctggtgctgactacttcttgggttacctatcgcagtattacgaaattgttttgttttcatccaactatatgatgtactctgacaaaatcgctgaaaaattagatccaatccatgcattcgtatcttataatttgttcaaggaacactgtgtttacaaagacggtgtgcacattaaggatctgtcaaaattgaatagagatttgagtaaagtaatcattattgacactgaccctaacagttacaaattgcaacctgaaaatgctattccaatggagccatggaatggtgaagctgatgacaaattagtaagattgattccatttttggagtaccttgccactcaacaaaccaaggatgttagaccaatcttgaacagctttgaagacaagaagaacctagcagaagaatttgatcatcgtgtgaaaaaattgaaggataaattttacggagatcataaatctggtggcaactgggcaatgacggcactaggtctcggaaattccctgggcggcagcaccaagttcccgctcgatttgattcatgaagaaggacaaaagaactatttaatgttcatgaagatgattgaggaagaaaaggaaaaaattagaatacagcaggagcaaatgggcgggcaaacatttacgctgaaagactatgttgaaggtaacttgccttcgccagaagaacaaatgaaaatacaattggagaagcagaaggaggtagacgccttatttgaagaggaaaagaaaaagaagaagattgctgaatccaaataattttcatgtaaaccctcttctcatgtatctacgtatctatgtgtgtatgtaaatgtacctgtacactccccacaccctca

SEQ ID NO: 3111 - DNA, 1599 bp, Saccharomyces cerevisiae
ttgtgggatgctttctgttcaccttggttttctatgggtatataacagctgataaagaatcgaagaagtgaaaatgacgcacccagttatatcactaaagccaagctacaattctgtaatacggggctgccccggtttacctgatacgttaccacgaatcgaatgccagttaagagtgcgctcaaacaactctttgccattcaaattggtaaagatcgaaattgttttaaagacaattgaaatatatttcaacaaaaacctttatagcagcaataacagctctttcaccccatttaatcgtccgtcggacccctctaatggccattctgacaccagtaaccagaacatcagcattcattataagaaaaacatcgtgttatcccaccctacccatgatggcgacgatctcaacaatgatcttattggcatagacatacctttgacgattgggctacctgacgacatcaaagaaacaaactataatccgaaattcggcaaaacgcagactttcctggattgtaccgtgttttatacagaggtcggcggaggaagctcaaataagaaaagaaattttctttacccagtaaacgtcgaaaggtatacatacctaccttcaccgtcatatttcaggccaataaacagatcaaacatcacttctcccgatcaaaagttcttaattagttattccattgagaatccctgtgtttctatgaataatgacacgttgaaactctccatatcaatcaggctgaacccatttccgaacaatgccacaactccctcttcgaatgactttgatgtgtccacgccgacacttttctccacaaagaaaaagtttaagtccaagctcaaattgaaatcaattacaacacagatactagaatacttggaaattctgaagaaccaatcagaattctcatccacgcaaacaacaaatattttgcaaacctctgtaagacaggttgatcaaatcatctccatgaattcaatgatttttcaattcaacctaaaaatattcactaaggacaaaattttacaaagctttagatcttctgagtcgagttgtcccgaaactaaagtattaatcaacaaaatcgacgacattcctctgcaatatcatagttcgataactacgataggtcaacattttaatgtttctcactatctttcaataaggttcaaattcaataaaagtctgaaaaacttcgaaattaatcaccccctaatcatatcgttttggtcagtaagtcaattgccgctaatcgagaacctaatattgcaagaaagacaaactgctaaatttgccaagaagttttataaaaattttggtcgaatcaagaacacgagcaacaacaataacagctcgaactgtctagagtatccctccttgccgccaataatttataattttaacgacccagaaacaaataatagatttaatatattatactcgcaaaaggaccctagtcgtacggatccttctaaattgagaagagtacctgtcatacaatgaggcagtgattggcatggttcatatattaaatcaacgcagatacgtagatctataaagcttttgaataatgctaatgtattatatat

SEQ ID NO: 3112 - DNA, 2594 bp, Saccharomyces cerevisiae
gcctttgatatatattgaaaatggtatgtaccagcacgagctcaaacttttattccattgcacaatatattttacaatcatacttcaaggtcaatgtagattctctaaactctctgaaattggtggatttgatagtggaccaaacttaccctgattctttgacgctgcgaaagctgaatgaaggagcaacgggacaaccatacgattatttcaatacagtttctcgtgatgctgatatctccaagtgtccaatttttgcgttgaccatattttttgttatacgatggagccacccaaaccctccaatttcaattgagaattttactacagtaccgttgctagattcaaactttatttctctaaattccaatcctttactatatattcaaaatcaaaacccaaacagcaattcaagtgttaaagtttcaaggtcacaaacgtttgaaccttctaaagagttgatcgatttggtatttccatggctgtcttatttgaagcaggatatgcttcttattgataggacgaattacaagctttattctctctgtgaactatttgaatttatgggcagggttgccattcaggatctccgatatctgagtcaacatcccttattactacccaatatcgtaacattcatttcaaaatttattcctgagttattccaaaacgaagagtttaaaggaatcggttcaattaaaaattcaaacaataatgccctgaacaatgttacaggaatagaaacccaatttttaaatccatctaccgaggaagtgagtcaaaaagttgattcttactttatggaattatcaaaaaaattaactacagaaaatatcaggttaagtcaagaaataacacaactaaaagcagatatgaactccgtaggcaatgtttgtaaccaaattttgctgttgcagagacaattgctttcaggaaatcaggcgatcggatcaaagtccgaaaatattgtgtcttccacaggtggggggatattaatactagataaaaatagcatcaattcgaacgtactgagtaatttggttcagtcgatagatcctaatcactccaagcccaacggacaagcccaaacacatcaaaggggtccgaaaggacaatcacatgcacaggttcaaagtactaatagccctgcgctagcgccaattaacatgttcccgagcttaagtaattctatacagccgatgcttggcaccttggctccgcaaccgcaagatatagtacagaagaggaagctaccgttaccaggttcaatagcctctgcagcaacaggcagtcctttttctccatcacccgttggtgagtctccctatagcaaacgctttaaactagacgataaaccaactccgtctcagacggctcttgattccttacttacaaaatccatttcaagccctagattacccctttcgacgttggctaacacagctgtcacggaatcttttcgctcacctcagcagtttcagcattctccagattttgtagttggtggtagctcaagttcaacaacggaaaataactctaagaaggtaaatgaagattctccatcatcttcttcaaaactagctgaacgacctcgtcttccaaacaacgactccactactagcatgcctgaaagtcccaccgaggtagctggtgatgatgttgatagggagaaaccgccagagtcaagtaagtcggagcccaatgataacagcccagaatcgaaagatcctgagaaaaatggtaaaaacagtaatccgcttggtacggatgctgacaaaccagtaccaatttctaatattcataattctactgaggctgcaaattcaagtggtacagtgacaaagacagctccatcatttccgcagagttcttctaagtttgaaattataaataaaaaggatacgaaggcggggccaaacgaggcaatcaaatacaagctgtccagagaaaataaaacaatatgggacctatatgcggagtggtatattggtctgaacggtaaatcttcaataaaaaaattgattgaaaattatggctggcgaaggtggaaggttagcgaagattcacatttttttcctactagaagaattattatggattatattgaaacggaatgtgatcgtggcataaaactcggcaggtttactaatcctcaacaaccgagggaggatatacggaagattttagtaggggacctagaaaagttcaggataaataacggtctgactctgaattctctatcattgtactttagaaatttaacgaaaaataacaaggaaatttgtatttttgaaaactttaaaaattggaacgttagatcaatgacagaagaagagaaattaaagtattgcaaaaggcgacataatacaccatcttaagtttattgaggttgtccgcgacaatagttccttcaacaaaataacgaagcgacgataacgagaaatgtcattaggttattactacctttatagaaaatatatatacttatttaatatttatatagatttatgtgtgtacatacctatgcggatgtatgcctatgtgggaattcctaaatgtctttccatcaacgactaaatatatattctcatgac

SEQ ID NO: 3113 - DNA, 616 bp, Saccharomyces cerevisiae
tgagacagtcaaggacactaaacaaaaatgggtaaatcacatggttacagatctcgtacacgttacatgttccaacgtgacttcagaaagcatggtgccgttcacatgtccacctacttgaagatctacaaggttggtgacattgtcgacatcaaagccaatggttctatccaaaagggtatgccacacaagttctaccaaggtaagaccggtgtcgtctacaacgttaccaagtcttctgttggtgttatcatcaacaagatggtcggtaacagatacttggaaaagagattgaacttgagagttgaacacatcaagcactctaaatgtagacaagaatttttggaaagagttaaggccaatgctgctaagcgtgctgaagccaaggcccaaggtgttgctgtccaattgaagagacaaccagctcaaccaagagaatcccgtattgtctctactgaaggtaacgttcctcaaactttagctccagttccatacgaaaccttcatttaatctacctcgtttggtatatttatcgaagttatcacattcctatatattgtatcctttacataagaattgcgtatagatagatactataacaatttacatgatatta

SEQ ID NO: 3114 - DNA, 824 bp, Saccharomyces cerevisiae
aattaataaaaacacaagaaaactaatacagcaacagaaatacaaaagtatacaacatgccaagagccccaagaacatattccaagacttactctaccccaaagagaccttacgaatcttctcgtttggacgcagaattgaagttggccggtgaattcggtttgaagaacaagaaggaaatttacagaatttccttccagttatctaagattcgtcgtgctgcaagagacttgttgacaagagacgaaaaggacccaaagagattgttcgaaggtaatgctttgattaggagactagttagagtcggtgttttatccgaagataagaagaagttagattatgttttagccttgaaggtcgaagatttcttggaaagaagattgcaaactcaagtctacaagctaggtttagccaagtctgtccaccatgcaagagttttaatcactcaaaggcacattgctgttggtaagcaaattgtcaacatcccctctttcatggtcagattggactctgagaagcacattgactttgctccaacatctccattcggtggtgctagaccaggcagagttgctagaagaaatgctgcaaggaaggcggaagcttctggtgaagctgctgatgaagctgatgaggccgatgaagaataattgtgctgatttttatttcttaattacgtgttgaaatcacgatactggcatccgataggggagttgtattcacaatactatcgattttgtaaaataggacgaagaactttttatatacgagcatttcctaattagtaggaagcggaaaataataatataagaaagtaaacgcaa

SEQ ID NO: 3115 - DNA, 1185 bp, Saccharomyces cerevisiae
aaaaaaggaaataactatctggtttatctgcattgttcttcgtttttcaattcaagaatttaagcaaaaggatatatcatagaacctagtgaatttttaagaaagtaagataaagaaaaaaatcaaatgctgttcagctggccttatccagaagccccgattgaaggttattggggcaagccaacttctctgattgattggtgcgaggagaattatgtcgtatccccctatattgcagaatggtcaaatactattaccaatagtatattcttaatgaccgccttctattctacatatagcgcttggcgtaataagttagaaacaaggtatatattgataggaatggggttctcgctggttggtattggttcgtggttatttcatatgactttacagtatcgttatcaattgctagacgaactaccaatgctgtatgcgaccatcatcccatcgtggagtatttttgcagaaactcaagaaatcttgattaaggatgagaagaaaaggaaggaaagctcatttagaatccaaatggtcatttcttttatcatgtgtggtatagtcaccattttaacctggatttacgttgtcgtccaaaagccagcaattttccaagtcctttatggtatattgacgcttctagttgtggttctttctggctggctgacctactatcacgttcatgattcatttgcaaagaaaaatctttttattactatggttatgggcatgattccttttgtcattgggttcatttgctggcaactagatattcacctgtgttctttttggatctatatccggagaacatatttggccctgccattaggtgttctattggaactgcatgcttggtggcatcttttgaccggtactggtgtctatatcttcgtcgtgtatttgcaatatttgagaatattaacccatggaaatccaaatgacttcttatttatatggaggtggggatttttccctgagctggtaagaaagggcttaccgattggtacttcttattcactggagtatctggggccaattgtaaatacacaggtagatgatgaaacaaaaaagaataactaaggagtgattttgtgccatccatttgaatcttcaaaatatatgtacgtatatgttatgtatgtatataaattgttgtacgtgcaattgaccgaacgtgtatatttg

SEQ ID NO: 3116 - DNA, 1625 bp, Saccharomyces cerevisiae
tattttgctgctttccttcatatgtatatatatctatttacatattagtttacagaactttatgctttctgcaaccaaacaaacatttagaagtctacagataagaactatgtccacgaacaccaagcattacgattacctcgtcatcgggggtggctcagggggtgttgcttccgcaagaagagctgcatcttatggtgcgaagacattactagttgaagctaaggctcttggtggtacctgtgttaacgtgggttgtgttccgaagaaagtcatgtggtatgcttctgacctcgctactagagtatcccatgcaaatgaatatggattatatcagaatcttccattagataaagagcatttgacttttaattggccagaatttaagcagaaaagggatgcttatgtccataggttgaacggtatataccagaagaatttagaaaaagaaaaagtggatgttgtatttggatgggctagattcaataaggacggtaatgttgaagttcagaaaagggataatactactgaagtttactccgctaaccatattttagttgcgaccggtggaaaggctattttccccgaaaacattccaggtttcgaattaggtactgattctgatgggttctttagattggaagaacaacctaagaaagttgttgttgttggcgctggttatattggtattgagctagcaggtgtgttccatgggctgggatccgaaacgcacttggtaattagaggtgaaactgtcttgagaaaatttgatgaatgcatccagaacactattactgaccattacgtaaaggaaggcatcaacgttcataaactatccaaaattgttaaggtggagaaaaatgtagaaactgacaaactgaaaatacatatgaatgactcaaagtccatcgatgacgttgacgaattaatttggacaattggacgtaaatcccatctaggtatgggttcagaaaatgtaggtataaagctgaactctcatgaccaaataattgctgatgaatatcagaacaccaatgttccaaacatttattctctaggtgacgttgttggaaaagttgaattgacacctgtcgctattgcagcgggcagaaagctgtctaatagactgtttggtccagagaaattccgtaatgacaaactagattacgagaacgtccccagcgtaattttctcacatcctgaagccggttccattggtatttctgagaaggaagccattgaaaagtacggtaaggagaatataaaggtctacaattccaaatttaccgccatgtactatgctatgttgagtgagaaatcacccacaagatataaaattgtttgtgcgggaccaaatgaaaaggttgtcggtctgcacattgttggtgattcctctgcagaaatcttgcaagggttcggtgttgctataaagatgggtgccactaaggctgatttcgataattgtgttgctattcatccgactagcgcagaagaattggttactatgagatgaagcaacgaaactagacgtccaatctgctgttgctatactggacttttgtactcttgtaaacaatcttatatagcatcctgaaatacgtagtaattttgtcatttctgttcaa

SEQ ID NO: 3117 - DNA, 1590 bp, Saccharomyces cerevisiae
caaattctccgcatttagacaacacacaaattacagctttcccctagtaacgattgttgattgagctcagacaatacgcgcaatttaaaaacgttttatagtgtaagagaagacaagtacaagaaaaaaatggttgccaattgggtacttgctcttacgaggcagtttgaccccttcatgtttatgatggtcatgggtgtcggcatttcatcgaatattctatatagcttcccatatcctgcaaggtggctaagaatatgctcctacatcatgtttgctatcgcttgccttattttcattgctgtgcaggcactacaaatattacatttgattgtctatattaaggagaaaagcttcagagaatattttaatgactttttcagaaatatgaagcacaatttattttggggtacttatcccatggggttagttacaattataaatttcttaggagcactctcgaaagcgaacacgacgaagagccccactaatgccagaaatttgatgatatttgtttacgtcttgtggtggtatgatctcgcagtctgtctagtaatagcgtggggtatctcgtttctcatctggcatgactattaccctttggaagggattgggaattatccttcatataatatcaaaatggcatccgaaaacatgaaaagtgtattgctactggatatcattccgctggttgtcgtcgcttcaagttgtggaacattcacaatgtcagaaatattcttccatgcgtttaatagaaacattcaactgataacgttggtcatatgtgccttaacgtggctgcatgccattatcttcgtcttcatactgattgcgatatacttctggagtctttatattaataagataccaccaatgacacaggttttcaccttattcctgcttttgggcccgatgggccaaggaagttttggagtcttattgcttacagataatataaaaaaatatgcgggcaaatattacccaacagataacattacaagagaacaagagatattgactattgcagttccatggtgtttcaaaattctaggcatggtttctgctatggcattgctcgctatgggctattttttcaccgtgatttctgtcgtttcaatcctgtcgtactacaataaaaaagagattgaaaacgagacaggaaaagtgaagagagtttataccttccacaaaggtttttgggggatgactttcccgatgggtactatgtctttaggaaacgaagagttatatgtgcagtataaccagtacgttcccttatatgcatttagagtcctaggaaccatatacggcggtgtttgcgtttgttggtcaattctatgccttttatgcacattgcatgagtattctaaaaagatgctgcatgctgcccgtaaatcttcattattttcagagtcaggtacggaaaagacgacagtttctccgtataacagcattgaaagcgtggaagaatcaaactcggctctagattttacgcgtttagcataaaattgttggttttatacgtacataattggcaagcatttcatgtaggagtctcaatagatagtttaattcatttgcacggcgctt

SEQ ID NO: 3118 - DNA, 2241 bp, Saccharomyces cerevisiae
tttataaaaaagtaagtgtaccctccaaaagcaaacacatctccctcctataccgaagatgcaactttcatggaaggatatccctactgtcgctccagcaaatgatttgctggatattgtcttgaacagaacccagagaaagacaccaactgtgatcagacctggtttcaagattacaagaatcagagcgttctatatgcgtaaagttaaatacacaggtgaaggtttcgtggaaaaatttgaggacattttaaagggttttcctaacatcaatgacgtgcatcctttccatagagatttgatggacaccctatacgaaaagaatcattacaagatatctttggcagctatatctcgtgcgaagtcccttgtggaacaagtcgccagagattatgtcagattgctaaaattcggtcaatctttatttcaatgtaaacaattgaaaagggccgctttaggtagaatggcaactatagtcaagaaattgagggacccattggcctatttggaacaagtcagacagcacattggtagattaccatcgatcgacccaaataccagaaccttgctgatctgtggttatccaaatgtcggtaagtcctcgtttttgagatgcattaccaaatcagacgtcgatgttcaaccatatgctttcacaaccaagagtttatacgttggtcattttgactacaaatacttgagatttcaagctattgacacccctggtatcctagatagacccactgaagaaatgaacaacattgaaatgcaatcgatttatgccattgcccatttacgttcttgtgttttgtacttcatggatctttccgaacaatgtggtttcaccatcgaagctcaagttaaactattccactccatcaagcctctattcgccaacaagtctgtcatggttgttatcaacaaaaccgacattatcagaccggaggatttagacgaagagcgtgcacaattactggaatctgttaaggaggttccaggtgttgaaatcatgacttcttcatgccaactggaagaaaacgttatggaagttagaaacaaagcatgtgaaaaactattggcttctagaattgagaataagttgaaatctcagtctagaatcaacaatgttctgaacaagattcatgttgctcaacctcaagcaagagatgatgtcaagagaacaccatttatcccagaatctgtcaagaatttgaagaaatacgaccctgaagatccaaacaggagaaagttggccagagacatcgaagctgaaaatggtggtgctggtgtcttcaatgttaacttgaaggacaagtacctattagaagatgatgagtggaagaatgacatcatgccagaaatcttggatggtaagaatgtttatgatttcttggaccctgaaatcgctgctaaactgcaggctcttgaagaagaagaagaaaaattggagaacgaagggttctacaattctgacgatgaggaagaaatctacgacggtttcgaagcatccgaagtagatgatatcaaggagaaagctgcatggattagaaatagacaaaagacgatgattgctgaagcaagaaataggaagtccttgaagaacaaagctatcatgccacgttctaaactaactaagtcctttggtaaaatggaagaacacatgtccactttgggccatgacatgtcagccttacaagataaacagaaccgtgctgctcgtaagaaccgttatgttgaaagaggttctgatgttgtttttggcgaccaagatgctttgacagcttccactgaaaacggtgtcaagttgagacaaaccgatagactgttggatggtgttgctgatggctccatgagatccaaggccgacaggatggccaagatggaaagaagagaaagaaatagacatgccaagcaaggtgaatctgatagacacaatgctgtttccttatcaaagcatttattcagtggtaagcgtggtgtcggtaagacagatttccgttgatttctctacttcttattctttcttttgcatgtactttaaaaaaaatatgaatataaaatgtggatgtacgtacacgacattctaatctttttgggctggtaggattaccatttacatttgattatctctctcactattagtggtttctttttctttctttctcactttttctgtatcttttttttaaaaaaattttatttaatctgtataataataataaaccgatttaaattatccaa

SEQ ID NO: 3119 - DNA, 1488 bp, Saccharomyces cerevisiae
atgtcatttcgtaaaagaggtgaaatactgaacgatagaggtagcgggctaagaggtccactgttaagaggtcctccacgaacttcctcaacgccattgaggacaggcaacagaagagcccctggaaatgtgcccttgtctgacactacagcgagattaaagaagttgaatattgcggacgaatccaagacaaaaatggggctggatagctcccatgtgggcgttagaccttctcctgcaacctctcagccgacgacatcaactgggagtgctgacctggacagtatactaggccatatggggctgccgctgggaaactctgtactagtagaggagcagagcacgacagaatttcactctattctcggtaaactgtttgccgcacagggtatcgttcataatagaatttcagatagcagtgctgataaaactagaaacggcgacactcatgtcattgtcttgtcattgaaccaaatgtttgcaaaggagctacctggtatctacaagggatcacgtaaacaaatgaagaaaaacctaatctctgaagaagaatcaaaagttactgttcaaaatttgaacgagacccagagatcgacgccttccaggtacaaagacctgaaaattgcatggaaatataaactggcagatgaaaagagattgggttctccggatcgagatgacatccaacaaaattctgagtacaaggactacaatcatcagtttgatattacaacgcgtctgatgcccgctcccatagcatctgaactgacatttatcgccccaactcaacctgtctccactattttgagccaaatagaacagactattaaaaggaatgacaagaaactgataagaattgttattccttcccttctacatccggcaatgtatccgcccaaaatgtttgaatcatctgaaataataggtttaatgcacggtgtgaggagtcttgtcaagaaatactatgagcgggttgtactgtttgcttccatatccatagacattatcactcccccattactggtattgctgagaaacatgttcgattctgttatcaatctagaaccctttaaccaggagatgactgagttcttagaacgtgtttataaatcgcaaccggggaagattcaacatgggctagtccacatattgaaattaccagttttcacggaccgtggagagatgagagttttaaagtctgaatgggcatttaagaatggcagaaaaaagtttgaaatagaacaatggggcatacccgtggatgatgctgaaggttcagctgcctcggaacagtcacattcacactcgcactcggatgaaatctcacataatatacctgcaaagaagaccaagatatctttagactattaagaatatggttcaatttatgggaaatatacggcatgctttttaacaagcgtggtgaatgtattatttttttatctgttatatcttaaatacgactattatatatatatccatcgtctt

SEQ ID NO: 3120 - DNA, 1143 bp, Saccharomyces cerevisiae
cagaaacaacaacaacaactatatcaataacaataactactatcaagatggaaacaggacctcattacaactactacaaaaatcgcgaattgtccatcgttctggctccattcagcggcggtcagggtaagcttggtgtcgagaagggccctaaatacatgcttaagcatggtctgcaaacaagcatagaggatttgggctggtctacggaattagagccctcaatggacgaggcccaatttgtgggaaagttgaaaatggagaaggactccacaactgggggttcctctgttatgatagacggtgtcaaggctaaaagagcagatttggttggtgaagccaccaagttggtgtacaactccgtgtcgaaagtggtccaggcgaacagattccccttgaccttgggtggtgatcattcaatagccattggtactgtatccgcggttttggacaaataccccgatgctggtcttttatggatagacgcccacgctgatataaacaccatagaaagcaccccctctggaaacttgcacggctgtcccgtgtcattcctaatgggtttgaacaaggatgtcccacattgtcccgagtcgctcaaatgggttccaggcaacttgagcccaaaaaagatcgcgtatattgggttgagagatgttgatgccggagaaaagaaaatcttgaaagatctgggtatcgccgccttttccatgtaccacgttgacaaatacggcatcaacgctgtcattgaaatggcaatgaaagccgtgcacccagaaacaaacggtgaaggtcccattatgtgctcctatgacgtcgatggtgtagacccattatacattcctgctacaggtactccagtgagaggtgggttgaccttgagagaaggtcttttcttggtggaaagattggccgaatccggtaatttaattgcgctagacgttgttgaatgtaaccctgatctggctattcatgatatccatgtttcaaacaccatctctgcaggttgcgccattgcaaggtgtgcattgggtgaaaccttattgtagtttatatcatcatcccttttatcaaaataagcattctctttttattttagttaagcacatgcatacataaatttacgaacaaaaaaagaaaata

SEQ ID NO: 3121 - DNA, 2223 bp, Saccharomyces cerevisiae
gaaattcgacgatataatatgtcttccaagcattcagatccattggagagattttataagcaatttcaagcatttgttcaaaataaccctaatgtcatatcggcagctcgagctgccgcacaaataccggaatctgcaaaagctgttgtagtactatccccatattctttacagcatgtgttcccgagagaatgggtaacaaaatcgtataggaaaactatagtcgaacgaccagaaagattattagcaagctcgatgggtatatcagctgcgattacaatgtatccatcccttttcaccttgaaatcctcgcatcaaaggaaaggttcattgatggcacctcatgtgcttaaagttcatggcagtagctggccggctgagttaattgaactttgccaaatggcagatgctaaattgctaaaaggcgaaatcgaagtcccagatacttggaactcaggtgatatatacttgagctcaaagacaattaaagctctacagggaacaattggggccattgaaactggtgttgactcaattttcaaaggaccatctgcagaacatattagtaacagagcttttgttgctatacggcctcctggtcatcattgccactatggtacaccatccggcttttgtctgttaaacaatgcacatgtagccatagaatatgcgtatgatacttacaacgtcacgcatgttgtcgtgcttgatttcgatctacaccacggtgatgggacccaagacatttgctggaaacgtgcgggtttcaaacctgaggaggaacctgaagattcatcttatgatgattttggtaagaaatttgccgaatttcccaaagtcggttatttttctatgcatgatataaattcatttccaacagagtcgggatttgccacaaaggagaacattaaaaatgcatctacctgtatcatgaactctcatgacctaaacatctggaatattcacttatccaaatggacaaccgaagaagaattcaatgtattatacaggacaaaatatagaactttatttgctaaagcagatgaatttttcaggagcgcaaaactagaaatgaatcaacaagggagaccattcaaaggtttggttgtcataagcgcaggtttcgatgcatcagaatttgagcaaacttcaatgcaaaggcatagtgtcaacgttcctacaagtttttatacaacgttcaccaaagatgcattgaaattagcacaaatgcactgtcatggcaaagttttgtctctaatggagggtggatattctgataaagctatatgttctggtgttttcgcacatttgatcggtttacaaaaccaagattgggttaaagaatgggggtctgaacaagtcgttaaagagattgttcgtggttgcaaaccggcttggaaaccctataagacaaaaagagcaaaagatgtcataagaatatgggcagaagaagttatcaggctgggacgagcaatgataccggaattcgatgatatcatttttaaagacgcagttaacagcgcaccttctaattctctactaaaggctactgtcgaaccagcatccacgtcgacaattgctcaaagaataatcagatctcatagaagcaacgcttccccagaaaaagaacttcatgaaaacaagccgagaagcacggaaaaacaggaacaaagggaaattagaagcgataccaaggtcaagcagctctcgtcaaataatagagcagctgaaacccaaattccgtttttgcaacaagaattttccagtgaggatgaagatgaagaatacgtttacgatgaagaattgaacaaaactttcaatcgcacggtggaggatattaccattgatgatatttctagacatttggagaccttagaaattgaaaaaaaaggtgatgaagattcagaccatgagctaaaagaaaaaaattggaaaaactcgcaccaacgccgtctacaaggtaatggaatgtataaaattccctccaatacgaaaccgcatcgcataagacagcctcaaaacgcaaatacaccaacttatgacgatagtgatatatcaatgatttctcatgtttcaagaaaacatacaacaagaagtggtggaagatggtgataccaatgcatatataatgttgtcttgaacccactaaagaagtgacgcatatattacttttttgtatttagtaacacaatttttctatttttatatttccttgtatagtta

SEQ ID NO: 3122 - DNA, 1222 bp, Saccharomyces cerevisiae
catacagacatttgctacaacccttggtgagactgtttcgatcatttttctttttctttttctttattttagaaaaaattgaacgaaatgacattggcagagttgcttggacggtcgagaatagctcaagtagctaacaatcataaaccattgacatacactggcaaaaaatttcatccaacacatcaaatcatcgaaactaagccatcgacactatacagacaagaatgggggttgaaatccgctattccttcgaaaattaaatctcgatatttggtgtacaacgatttggatacgttggaaagaattaccacattcgaacctagaggcggtacgcaatggaataggctaagatttcaagaaatgggagtaccaattgtgtctaatataggcagacaaaatccatttttcaagtacatatctcgtcctgaggatgagtctcatgctaaattgtccttattcaaagaaatgaaaggagatacagatatttcgcctgctgctatgaagaagcgtttgaagaagataacagcactaattagatcgtttcaagatgaatttaaagagtggctggtggaaaatcatccggatgaattgaaattgaattctaataagctggaagactatgtagtgaagtttctaaacaaaaagttggaaacaaaaacgaataaaaaatttaacactgaaatcattggtacaggtggattatcatacagcttgccaggaaagctaaaaaactcaccaaatggtgtcattcaaaggactgtagtacccggtagaatcttgaacgttgttaaggagaacaacgacaataaatggctggcagctattggtgggtttgtggccgatgtggtatttttccaatcaccacctagttcctttaactccatgggagatttcatcagaatgaaaacgttcttgttcgagatcttggaggcatctatggagaaaaatggttctgtttcgatgcacgctagattactcgaaccacaaaatgacaagaccagagaatttttcaataagagaccaatttataaaccattgacctctagaagggcacgtcgaccatcagtgggaaacattcaagaggccaataaccttttgaatataatcaagggaaattgagaagagaaaaaaaaaatgtgaacaatcaatgtatattcagagttctgtaaataaataaagaaaataaagtttacatattactaaggatttttgtcgccta

SEQ ID NO: 3123 - DNA, 2824 bp, Saccharomyces cerevisiae
cagaaccattttagctgatcaccagaatgacgcaatccctaggtatcgaacagtataaactgtcagtcgtatctggtgggaaacccgctttgaataatctcagttcagtaaccggcaataagaatatcgcccgcctatcacaagaccaacgaaactatattataccctttaacaatcagatcaaggtgtattctgtggaaactagacaatgtgttaagactctaaagtttgcaaataactccttgttatccggaatatttctgcaagaagaagagaataatgaatcgattgtaaagattctgctgggtgatataaccgttccgcaacaagaagacgctcatctgattaccgtattcaccaataatggtcatgtaattgttttaaattataaggggaagctggtcgagtcccctaagcatttcaaaatctctttggcagatgaaaagcttgcaaatgttttccatagcgagggcaactatagaattttgacaacgttcaaggaccctagtcaaaaggcacataactctttgcaatcgtacaggttatatgcattaacctttgacgatgctaaaaagcaatttgaagtggctcatcaggcagaatggcacaacgttatcttgtcaaatatttcttccaatggtaaactgctagcgcatatgtgcaaagacgtctcaacaaaagatcacgaacacaaatccatctcagttgtttcgctttttgatgattctgtaaatttaagctttcccctcggttccatcctttcttcacagactcaatccctatcctataacacaaggtacgtttctagcatggccatagacaatatgggtcaacaactggctgttggatttgcctccggagttataagtatcgtaagcctggccgatctacaaataagactgctcaaatggcatatagactctgtgctgtcactctcattctctcacgatggatcctatttgctatctggtggttgggaaaaagttatgagtttatggcaattggaaacaaactctcaacaattcctgcctcgtttgaacggtattataatcgactgtcaggtattgggacctcaagggaactactactctttaatcctacaaatgactgaaaacaattcaaattctgactaccaatttttacttttgaatgcttctgatttgacctccaaattgtcgattaacgggccattaccggtgttcaatagcaccataaaacacattcagcaaccaatctcggccatgaataccaagaactccaactcaattacctctctcaatcactctaagaagaaacaatctagaaaactaattaaatcgagaagacaagatttcaccactaatgtagaaataaaccctattaacaagaacttgtatttcccacacatttctgctgttcaaatttttgacttctataaaaatgagcaagttaactatcagtatttaacatcaggtgtcaacaattctatgggtaaagttagatttgaactgaatttacaagacccaataataactgatttgaagttcaccaaagatgggcaatggatgattacatacgaaattgagtatccgccaaatgacctcttatcttccaaggacttaactcatatcttgaaattttggaccaaaaacgataatgagacaaattggaatttgaaaacgaaagtaataaatccacacgggataagtgtcccaattaccaagatattgccttcaccaagatcagttaataatagtcaaggctgtttaacggctgacaacaacggtggactgaaattttggtccttcgactctcatgagagcaactggtgcttgaaaaaaatttctttaccaaactttaatcatttcagtaactccgtttctttagcttggtctcaagacgggtctctaatattccatggtttcgatgacaagttgcaaattttagatttcgacacttttaaaaagtttgaatcattggaaaatacaaagacggtcagtgagttcacgttagactctgaaatccaaaccgtcaagttgattaatgacacaaatttaatagtggccaccaggactacattaaacgccatcaacttattgcggggtcaagtcataaatagttttgacttatatccgtttgttaacggagtgtataaaaatggtcacatggataggcttattacttgtgacgaaaggacaggcaacattgccctggttataaatcaacaactaactgatctcgatggcgtaccaactatcaattacaaatcccgtattattatattcgattctgacttatctacaaaattgggtaattttacgcatcatgaatacatatcttggattggttggaattatgatactgatttcatatttttggacatagaatcaacactaggtgttgtcggaaccactgtgaatactcaactatctgatgaagttaataacgaaggaatattggatggcctggtaagtaacaccatcacaacttcggcatccaatagcgatatttttgcagaacaattgcataaactgtcgtctaggggcaaaaaaagtgacactagagataaaaataccaatgataacgacgaagatgaagaagatatcgctttggaatttataaatggcgaaaagaaagataagctagtcaatatgaatagttttacgagcatgtttgacaacattcaaaacgtgcaaatggatacattttttgatcgtgtgatgaaagtattaacatagctttagggttcttccattggatatccaaaatagatataaaggtatatatatatatatatatatatatatgtttataaagcaaaccgaaagcaaaaatatctgtataa

SEQ ID NO: 3124 - DNA, 896 bp, Saccharomyces cerevisiae
cgtaatttttctccttcgtgacctcggagctgactgatattagataactaatcatggtagctacagtaaaaagaaccatccgtataaaaacccaacaacacattctgccagaagtgccaccagtagagaattttcctgttcgtcaatggagtatagaaattgtattattggatgatgaaggaaaagaaattcccgctacaatttttgacaaagttatttaccacttgcacccaactttcgccaatcctaacaggacatttactgacccaccatttagaattgaggaacaaggttggggtggatttcctttagatataagcgttttcttgttggaaaaagcaggtgagcggaaaataccacacgatttgaactttctacaagagagttatgaagtggagcacgttatccagattcctctcaataaaccacttttaacagaagaacttgcgaaaagtggatctactgaagaaacgacggccaatacaggcaccattgggaaaagaaggactaccacgaacacaactgcagaaccaaaggcgaagagagctaagacgggcagtgcatctaccgtgaaagggagcgtggacctagaaaaattagcgttcggattgactaaactaaatgaagatgacctggttggtgttgttcaaatggttaccgacaataaaacaccagaaatgaacgtgacgaataatgttgaagagggtgaatttataattgacttgtatagtttacctgagggattattgaaaagtctatgggactacgttaagaaaaataccgagtaataaaaggtaaaagggcgttaaatgcgcgcttttatgtttgtataaataaaacacgttgatattttgtcttatataaactttattccaataaccgcgacaccttaccaa

SEQ ID NO: 3125 - DNA, 1014 bp, Saccharomyces cerevisiae
cgtcacaaatctcagcaacaatggctttccaaaaagacgctaagtcctctgcttactcctctcgtttccaaactcctttcagaagaagaagagaaggtaagactgattactaccaaagaaagagattggtcacccaacacaaggccaagtacaacactccaaagtacagattggttgttagattcactaacaaggatatcatctgtcaaatcatctcttctaccatcactggtgatgtcgtcttagctgctgcctactcccacgaattgccaagatacggtattacccacggtttgaccaactgggctgctgcttacgctactggtttgttgatcgccagaagaaccttgcaaaagttgggtttggacgaaacttacaagggtgttgaagaagttgaaggtgaatacgaattgaccgaagctgttgaagatggtccacgtccattcaaggtcttcttggatattggtttgcaaagaaccaccactggtgccagagttttcggtgctctaaagggtgcttctgacggtggtttgtacgttcctcactccgaaaacagattcccaggttgggacttcgaaaccgaagaaattgacccagaattattgagatcttacatctttggtggccacgtttcccaatacatggaagaattagctgacgatgatgaagaaagattctctgaattattcaagggttacctagctgacgacattgatgctgactctttggaagacatctacacttctgctcacgaagctatcagagctgacccagctttcaagccaactgaaaagaaattcaccaaggaacaatacgctgctgaatccaagaagtacagacaaaccaaattgtccaaggaagaaagagctgctcgtgttgctgccaagatcgctgctttggctggtcaacaataaattatggatatataacgtcattttgagatattttaaataaagctatcttcacataacctttgtattcatttttagttaactcatttacatcatccactta

SEQ ID NO: 3126 - DNA, 1104 bp, Saccharomyces cerevisiae
tcaaagaacagtgaagagtctaaaggggcagcgaacgcttaagtatcttctttaaagtaataatattcctgtcgcaggtgaaatagcacttcagcgcacaaacaaataatattgcagccaaaattccctaatattgtcatgataagaatatgtcccattgttagatctaaggttccactgttaggaacttttcttagatccgactcatggttggcacctcatgcgctagctctaaggcgggccatatgcaaaaacgttgcattgagaagttattcagtgaacagcgaacaaccaaaacatacatttgatatttcaaaacttactagaaatgaaatccagcaattgcgagagttgaaaagagcaagggagagaaaatttaaagatcgtacggttgcattttatttcagcagcgtcgcggtacttttcttgggtttggcatatgcagcggtaccactctatagagccatttgtgctcgtactggttttggtgggattcccataacagatagaagaaaatttaccgacgataaactcattcctgtagatactgagaagagaattcgtatctcattcaccagtgaagtatcacaaattttaccgtggaaattcgttcctcaacaacgtgaggtttacgttctgcctggtgaaacagccctcgctttttataaagccaagaattacagcgataaagatattattggtatggctacttatagcatagcgcctggtgaagcagctcaatactttaataaaatccaatgtttttgctttgaagaacaaaagctagctgccggtgaagaaatagatatgcctgtcttcttttttatcgatccagattttgctagcgatccagcgatgcgaaatatcgatgatattattttacattacacattcttcagagctcattatggtgatggtacagctgtaagtgactctaaaaaggagcctgagatgaatgcagatgaaaaagcagcgtcattggctaatgctgctattttatccccagaagttatagacacaaggaaagacaactcaaattaattgtaaatacaaagtcattcaatgtacataaatactgttatgcttttgaattaagtaaaacac

SEQ ID NO: 3127 - DNA, 963 bp, Saccharomyces cerevisiae
atatatttgtgttcagagattattcttaaatccataagaacatcccttcatataacaattgaataaggaaaacacaacacataacacatatttaacctgatgcttcctgttataacgagatttgcaaggcctgctctgatggccatcagacctgtgaatgccatgggggttttgagagcgtccagcataacgaaaaggctttatcatcccaaggtcatagagcattatacacatccaagaaacgtcggctcattagataaaaaattgcccaacgtcggcactggtctagtgggtgcgccagcgtgcggtgatgtgatgaggttgcagatcaaagtcaacgactctactggcgttattgaagatgtcaaattcaaaacttttggatgtggctccgccattgcctcctcttcatatatgactgaattggtacaggggatgaccttggacgatgcggcaaaaattaagaacactgaaattgctaaggagttgagcttgcccccagtcaagttgcattgctctatgttagcggaagatgcgatcaaggcagctattaaggactacaaatctaagagaaacactccaaccatgttatcgtaatgaataagaagataaccgggacaagaacaagatcaaaccctcactaatcaacaagttggacttaatttgtgcaagcatggatgtttctcattaatattgtcatatttctttcccttaatctagcatttcctttctctccctcttctcatgcatatcttcctagatatatttctccagggtgaaagcgggacggacgtgcttgttttacctcacctggtactactagtattttcattactcttttttcatcctcccacttcccccttatatatttgttttcccatgtgtggtatatggcatcattattatataaatattctttagttgtaaaaggctgttttaattaacactatttatcgctagaca

SEQ ID NO: 3128 - DNA, 394 bp, Saccharomyces cerevisiae
acaatcaaataaattgaaaaatggctgaatcccatagattgtacgtcaaaggtaagcacttatcctaccaaagatccaagagagtcaacaacccaaatgtctctttgatcaagatcgaaggtgtcgctactccacaagatgctcaattttacttgggtaagcgtattgcctacgtctacagagcctccaaggaagtcaggggttctaagattagagttatgtggggtaaggttaccagaactcacggtaactctggtgtcgttagagccaccttcagaaacaatttgccagccaagaccttcggtgcttctgttagaatcttcttgtacccatccaacatctaaatttgttgattgtataagtactctattaaacatcgttattttctctttta

SEQ ID NO: 3129 - DNA, 553 bp, Saccharomyces cerevisiae
ccgttgagattagacgcgagtgattgtgatgttagtaaagacgattagccgaactattgaatcagaatctggatttctacagccgacgctggatgttattgctactctacctgcagacgatcgttctaaaaaaatacctattagtctggtagtgggatttaaacaagaggcctcgctgaattcatcttcatccttatcatgttattactacgccattcccttaatgagggatagacatattaacctcaaatcaggcggaagcaacgttgtggggataccgttattagatactaaagatgaccggattcgtgatatggctagacacatggccacaataatatctgaaaggttcaataggccgtgttatgtaacgtggtcatcgctgcctagtgaagatccctctatgctagtagcaaaccatttatatatcttaaagaagtgtctcgatctcttgaaaactgaactcggtgagtaaagtaagagttctttagacattcatgattgtaatgtaatttaattaaaatactaagtataatgcggctccaaaatactg

SEQ ID NO: 3130 - DNA, 1028 bp, Saccharomyces cerevisiae
tcatcaccttttttacactaaataatgaagtagcatgctcagaagtgcgaatgaatttttgttcttttggttctagaagaacggagataggaaacctatgatgtaagtatgaatgacattaaacaattactttggaatggtgagcttaatgtgctggtatcgatcgatccttcatttttgatgaaaggaagtccaagagaaattgcggtgctacgaataagggtaccaagggaaacatatttagtcaattatatgcccctcatttggaacaagattaaaagctttctttcttttgacccattgaccgacagtgagaagtatttctggtttgagcataataagacgcctattccgtggaattacccagtaggtgttttgtttgactgcctagccggaaaaagcgctacttttaccacctcttttgagaaccaggtaaaggatgttctcacttttttgagaattcacttggttatgggcgattcgttgccaccaactatcattcccatcgcatctagcaaaacgcaagcggaaaagttttggtttcaccaatggaaacaagtttgcttcatactgaatggttcctcaaaagctattatgtctttatcggtcaacgaagctcgaaaattttggggcagtgttattacgagaaatttccaagatttcattgaaatatctaacaagataagttcatcaagaccgcgacatataccgctcatcattcaaacctcaaggacatcaggaacttttcgaatatcacaaccaactatcagtatgactggagtcaatcctacgttgaaggatattgaaggcgatattctggacgtaaaggaaggaatcaatggtaatgatgtcatggttatttgtcaaggaattgaaattccttggcatatgctcctgtatgatttgtattctaaattgcgaagttttgatggctttttgtacataactcttgttcctataaaaggcggcgataaagcttcctctgagctctaagagctgttatatacgcatttaaaagtgtcattcaa

SEQ ID NO: 3131 - DNA, 3496 bp, Saccharomyces cerevisiae
atttttttccagagtgaagaatataaaaaaaatatctttaaccagtctataatgtcttctggtttggtcttagaaaacacggcacgtagagatgcgttaatcgccatcgaaaagaagtaccaaaaaatatgggctgaagagcaccaatttgaaatcgatgcgccatcaatcgaagatgagcccattacaatggactctgaagagttacatcgcacgtatcctaaattcatgtcgtctatggcctatccttatatgaacggtgttatgcacgccggccattgttttactctctccaaagtcgaattttctattggttttgaaaggatgaacggtaaaagagctttgtttccattgggttttcactgtacaggtatgccaatcttagcatgtgccgataaactaaagagggaagccgaactttttggcaagaacttcgacaatgtaccagcagaagaagaagaaattaaagaagaaacgccggctgagaaagaccacgaggatgttaccaaattcaaagctaaaaaatctaaagccgcagccaagaagggccgtggtaagtaccaattcgaaatcatgttacagcttggtatccctagagaagaaatcattaagttcgccgacgccaagtactggttgacctatttcccacctttgtgtgaaagtgattgtacttcacttggggctcgtatcgattggagacgttcttttgtcaccactgatgccaatccttattacgatgcctttattagatggcaaatgaacaagttaaaggctgctggtaaaatcaaattcggtgaacgttatactatttactctgaaaaagatggtcaagcttgtatggatcacgatagacaatccggtgaaggtgttacaccacaagaatatattggtgtgaaaattgaagctttagagttcgccgatgatgccgcaaaaatcattgattcaagctcagatcttgacaaatccaaaaaattctactttgtcgctgccacgttgagaccggaaactatgtatggacaaacatgttgttttgtttctccaacaattgagtatggtatatttgacgctggtgattcttattttatcactactgaacgtgcattcaagaacatgtcttaccaaaagctaacaccaaagagaggcttctacaagccgatagttactgtcccaggtaaggcatttatcggtaccaagattcatgccccacaatctgtatatccagaactaagaatattgcctatggaaactgtcattgctaccaagggtactggtgtcgtcacgtgtgtaccatctaattcaccagatgactacattaccaccaaggacttgttgcacaaacctgaatactacggcattaaacctgaatggattgaccatgaaattgttccaattatgcataccgaaaagtatggtgatttaactgcaaaggctattgttgaagaaaaaaaaattcaatctccaaaggataagaacttgttagcagaagccaagaaaattgcttacaaggaagattactacactggtaccatgatatatggtccttataaaggtgagaaggtcgaacaagccaaaaacaaggttaaggctgatatgattgccgccggtgaagctttcgtctacaacgaaccagaatctcaggtcatgtcacgttctggtgatgactgtatcgtttctttggaagatcaatggtacgttgattacggtgaagaaagttggaagaaacaagcaattgaatgtttggaagggatgcaattatttgctcctgaggtaaaaaacgcatttgaaggtgttttggattggttgaaaaactgggctgtttgccgtacatacgggttaggtaccagattgccttgggatgaaaaatacttagttgagtctttatcagactctactatttatcaatcattttataccattgctcacttactatttaaggattattatggtaacgaaattggaccattaggcatttcagctgatcaaatgacagatgaggttttcgattacattttccaacatcaggatgatgtcaagaacaccaatattcctttgcctgctttacaaaagttgagaagggaatttgagtatttctacccattagacgtctcaatttccgggaaggatttgatccctaaccatttaactttcttcatttacacacatgttgcattattcccaaagaaattctggcctaaaggtatcagagctaacggtcatttgatgttaaacaattctaaaatgtcgaaatctacaggtaattttatgactttagaacaaacggttgaaaagttcggtgctgatgcagctcgtattgcgtttgccgatgcgggagatactgttgaagatgcaaattttgacgaatctaacgctaatgctgctattctgagattattcaatttgaaggagtgggcagaagaaattaccaaggaatctaacttgagaactggggaaattacagatttctttgatatcgcgtttgaacacgaaatgaatgctctgattgaaaagacttatgaacagtatgcattgactaattataagaatgccttgaaatacggtctttttgatttccaagctgctagggattactatcgtgaagctagtggtgtaatgcataaagatttaattgcacgttatattgaaacacaagccttattgctggctccaattgcgcctcatttcgctgagtatatttaccgtgaagttctaggtaaccaaacctctgtacaaaatgccaaatttccacgtgcatccaaaccagtagataagggtgttctggctgctttggattacttgagaaatctacagagaagcataagagaaggcgaagggcaagcactaaaaaagaagaagggcaagtctgctgaaatcgatgcatccaaacctgttaagttgactttattgatctctgaatcatttccagaatggcaatcacaatgcgtggaaatcgtccgtaaactattcagcgaacagactttagacgataacaaaaaggtcagagagcatattgagcctaaagaaatgaagagagctatgccattcatttctctattgaaacaacgtttagctaatgaaaagccagaggatgtgtttgaaagagagttacaattcagcgaaatcgatactgtcaaggctgctgcaaggaatgttaagaaggcagcacaagctttgaaaattgctgaatttagcgcaatttctttcccatatggcgccaaaaccggtaaggatatctttactggtgaagaagttgaaattccacctgtaacaaagattgttgaaaatgctgttccaggtaacccaggtgttgtcttccaaaatatttaaaggagaatatttcaagatgcctcatggtgattttccgataaaagatacaagaaattctcatagaaatacttataaagatcaataaacagcaaccagaaatcacgtcgcattgataatttgcctcgtatatatcgtataattattgtaattgcacaactgtttttgttttgta

SEQ ID NO: 3132 - DNA, 763 bp, Saccharomyces cerevisiae
caacgatcattttcttgttgcagtaagctataatagacgcgtcaaatagtctaaccagtctaaatctcatcagccacacacacgtacatcggaatattatagagaacaaatgtccttcattaaaaacttgttatttggaggtgttaaaacaagtgaggatccaaccgggctcacaggtaacggggcctcaaacacaaacgattctaataaaggtagtgaaccggtagtagcgggtaatttctttcctaggacgctttccaaatttaacggccacgacgatgaaaaaatatttattgctattaggggcaaagtatacgactgcacaagagggaggcagttttacggtccaagcgggccatacactaactttgcaggccatgatgcgtcgcgtggtcttgcattgaactccttcgatctggacgttattaaagattgggatcagcctatcgatcccttagatgatctgacaaaagaacagattgacgcactggatgagtggcaagagcattttgagaataagtacccatgcattggtactctgattccggagcctggcgtgaacgtatgacgattgagctccgcacattatttattaatagcaaacaccaaggaaagggaaaaaggaaggggcgtggtggacgatgatatatgtatacatatacatatctatattttgaaaaaatcttctatataacggttgtatagaaataattacttatttatgaattagtacaaaatatacaaagcatgctgctgttcggaa

SEQ ID NO: 3133 - DNA, 790 bp, Saccharomyces cerevisiae
tatcgaataaaagttgcatccattaatataccaataaataaagggaaagatgtccctggaagaatttgacgaagttaaatatgatcattcaactaaacgcctagatacaccatcaaggtacctgctgcgcaaggctagaagaaaccctaacgggctacaagaactgcgtgagtcgatgaagtcatccacaatttatgtaggaaatctttccttttatacatcagaagaacaaatttacgaattattcagtaaatgtggcacaataaaaagaataattatgggtttggaccgttttaagttcacgccatgtggcttctgttttattatatatagttgtccagatgaagcattgaatgccttaaaatatttgtccgatacaaagttagacgaaaagacaattaccattgatctagatcctggttttgaagatggaagacagtttggtcgtggtaagagcggtggtcaagtcagcgatgaattgaggttcgattttgatgcatccagaggtggcttcgccattccatttgcagagcgtgtcggcgtaccacattccagatttgataacagtagctcacaatctaatacgaataattatatccctcctcctgatgcaatgggtactttcagaccaggtttcgatgaagaaagagaagatgataactacgtacctcagtagaatcaatcaatttatatctgagaaagattctacacacagatatatatatatatatatatattattgtatatatacatacctacattatttttaaaggcttgcatgatgctgtta

SEQ ID NO: 3134 - DNA, 2042 bp, Saccharomyces cerevisiae
agaatcactacattcaaattaatcttgttttaccgagtctctgacgtttcatttacaagcttgtccttacaaaaaacctattttattactttagtccattttcctttcaagttagatattgttttcccttcacttatattctatttatgagaagaagcccgtccagatcaaataataactttgcagtaccgaattgctcaactaattcaaactctagtcagcaacaattaactacaccttcagatgatctcaacagtaacgaacctaatgacccagatgatagtaggtctctacctactatcaagaaattcaataataaacattctataaacaattacaacactttagcatcggccgggaaaaacaacaacaataaacgagctagcaatgataatttgctcattcctggtgagaatgcccataaacagaaaatatacactaaggatgaaaacttgaagagcttgtacctagatatcgatgtttctgtcgctaaagccctatcctcatcagcaactgctccgaagctgatcaataccgcaagaacttcctctactaccactgccactacctcaaataatatcctgacatcaccctcttatcgtgaatcaaattattcttctccatcctcatattctttttcctcctactactcatccgctacgtctgcttcctcatcaacctcatcatttttaaaatcttcagggttatcgtccagagttaagtctccttcatcttcggttaaggcaggttcttttggtgcgccttcgtccccaacatctgggatacctaatcctaaaagtagcaagaagcctatatttttgagacggtattctcatgatacctcttcaaatgaaggtcttgatatcgatgttgcgatcgaaaaattactacaagtgggtgagtcaagagaaattacaaaaacgtccaaaaaaaagaactttccattccattcttgggaaattcaactcatttgctatcatgcaagagaaatttttttgaatcaacctactcttttgagattacaagcgcctatcaaagttgtcggtgatgttcatggacaatttaatgatttattgagaattttgaagttgtctggtgtgccatctgatactaattatctgttcttgggtgattatgtggaccgtggtaagaactcattggaaacaatactattgttattatgttacaaaataaagtacaaagacaacttttttatgttaaggggtaatcacgaatctgctaatgtcacaaagatgtacggtttctatgatgaatgcaaaaggcgattgagctcgaaagtatggaaaatgttcgttgacgtatttaatactttgccattagcagcaattattcaagataagatcttttgcgttcatggaggtatatcgcccgatttacatgacatgaagcaaatcgaaaaagtcgcaagaccaacggatattcctgaaagcgggctggttacagacttactgtggagtgacccagaccctcaagtaactgattggtcagaaaatgatcgtggtgtttcatacacattttctaagaggaacgttcttgatttttgtgctaagtttaaattcgatttaatacttaggggacatatggtcgtagaagatggttatgaattctttgccaggaaaaagtttgtcacaatcttttcagcaccaaattattgtggagaatttcataattggggggcagtaatgagcgttacaacgggtatgatgtgtagctttgaactgttaaagccgcgtgcattgaaaaataaaaagaagttatacaaaaccaaagtgtagctgttgctaagattggttttgcctggaaagcacattggtttttaggcctcttatccttcatttggaaactttttgtcctatgatttgtttttttcattttatttttcattttatttttcattttattttcatttagttaacattattatgcagttatttttttttttcccaccttcatggcctcgtttatgtcttttatcaatatattttttacgtttataagtcatttactcgactttttttacc

SEQ ID NO: 3135 - DNA, 473 bp, Saccharomyces cerevisiae
ataacggctacggttcatagtacaaatctcagaatttttcagcaagcgaaaggatttcaaagaatgtttttacagactctccgcctaactatgccaaggatgtttttgcacatgaaaccgtcccccataacgataacaagggcctgcacagtgcccagcctcctatctgttgcagctccgcaaccagctcttgttgcagctaacagacctttggtttttaacagaggtttcaaggtcagaacatctgtcaaaaagttctgcagtgattgctacttggtaagaagaaagggaagagtatacatttattgcaagtcgaataaaaaacacaaacagcgtcaaggctgaaagatgtaaatctcttcgctgttctccgttcgggtgtttacaaaatattctcattttctaaaatctgtaaataatacatatctataatattcttttatgtatatgttaattttttgtatcattttttc

SEQ ID NO: 3136 - DNA, 498 bp, Saccharomyces cerevisiae
atgagatttccttcaatttttactgcagttttattcgcagcatcctccgcattagctgctccagtcaacactacaacagaagatgaaacggcacaaattccggctgaagctgtcatcggttacttagatttagaaggggatttcgatgttgctgttttgccattttccaacagcacaaataacgggttattgtttataaatactactattgccagcattgctgctaaagaagaaggggtatctttggataaaagagaggctgaagcttggcattggttgcaactaaaacctggccaaccaatgtacaagagagaagccgaagctgaagcttggcattggctgcaactaaagcctggccaaccaatgtacaaaagagaagccgacgctgaagcttggcattggctgcaactaaagcctggccaaccaatgtacaaaagagaagccgacgctgaagcttggcattggttgcagttaaaacccggccaaccaatgtactaa

SEQ ID NO: 3137 - DNA, 856 bp, Saccharomyces cerevisiae
ccatattacaaatctccatcaacgtcataatgtccactgaaaaaatcttgactcctgaatctcaattgaagaagactaaagctcaacaaaagactgcagaacaaattgctgcagagagagctgcccgtaaagccgctaacaaggaaaaaagagctattattttggaaagaaacgccgcttaccaaaaggaatacgaaactgctgaaagaaacatcattcaagctaagcgtgatgccaaggctgctggttcctactacgtcgaagctcaacacaagttggtcttcgttgtcagaatcaagggtattaacaagattccacctaagccaagaaaggttctacaattgctaagattgacaagaatcaactctggtacattcgtcaaagttaccaaggctactttggaactattgaagttgattgaaccatacgttgcttacggttacccatcctactctactattagacaattggtctacaagagaggtttcggtaagatcaacaagcaaagagttccattgtccgacaatgctatcatcgaagccaacttgggtaagtatggtatcttgtccattgacgatttgattcacgaaatcatcactgttggtccacacttcaagcaagctaacaactttttgtggccattcaagttgtccaacccatctggtggttggggtgtcccaagaaagttcaagcatttcatccaaggtggttctttcggtaaccgtgaagaattcatcaataaattggttaaggctatgaactaacattattccgtgtggcaataatctcaatgtataataaataatatttctcttcatatatatgaccggactcgtaatagaataattgactggaa

SEQ ID NO: 3138 - DNA, 1548 bp, Saccharomyces cerevisiae
catcaattcgtattttcgataattaacttgccttatagtgtctgattaggaaacaatcacgagacgataacgacggaataccaaggaagtttgtgcaaatatacagccggcacaaacagcagcttcactcaggttaactcacatactgttgaaaattgtcggtatggaattcgttgcagaaagggctcagccagttggtcaaacaatccagcagcaaaatgttaatacttacgggcaaggcgtcctacaaccgcatcatgatttacagcagcgacaacaacaacaacagcagcgtcagcatcaacaactgctgacgtctcagttgccccagaaatctctcgtatccaaaggcaaatatacactacatgacttccagattatgagaacgcttggtactggatcttttggtagggttcatttggtgcgctctgttcacaatggtcggtattatgctataaaagttttaaagaaacaacaagttgtcaagatgaaacaggttgaacataccaatgacgaacgacgtatgctaaagcttgtggagcatccgtttctgattagaatgtggggtacgtttcaagatgctaggaatatctttatggtgatggattatatcgaaggtggtgaacttttctcgttactgagaaagtcacaaagatttcctaatcctgtagcaaaattttacgctgcggaagtcatactggcattagagtacttgcatgctcataatatcatctacagggatttaaagccagaaaatatcttgctggatagaaatggccacattaaaataaccgattttgggttcgccaaagaggtacaaactgtcacatggacgctttgtgggactcctgattacattgctcctgaagttattaccacaaagccatataataagtcggtggattggtggtctctaggtgttctaatctacgaaatgttagctggttatacacccttttacgatactactccaatgaagacgtatgaaaagattttacaaggtaaagtagtatatccaccatattttcatcccgacgtcgtggatctactaagcaaactgatcactgcagatttgacaagaagaatcggtaatttacaaagcggttccagggacatcaaagctcacccatggtttagtgaagttgtatgggaaagattgttagcaaaggatattgaaactccatacgagcctcctatcacatcaggtatcggtgacacgtctttattcgatcaatatcccgaggagcagctagattatggtattcaaggcgatgatccatatgctgaatactttcaagatttctaagttccatgaaccaaaaaacacaaaaacaattttcaagtactttctctcactccttttcctttctcttttttcctccaccaaaatctggcgcactttctttatattttacctaacggatgccttatttgtggtctgttttaagctagttcatattgtaaaaaaagaaaaagagatgagaagaacaagcgttgccctaaatatcttctatactacaattcattttaattcaatatcatatttaa

SEQ ID NO: 3139 - DNA, 1830 bp, Saccharomyces cerevisiae
aaatacaaagagaagaaaggttcgacactcgaggaaagcatttggtggtgaaaacacatcttagtagcatctttaaacctctgttgggtacttagaaaaatatttccagacttcaaggataaaaaaagtcgaaaagttacgacatattcgaccaaaaaaaaaaaccaaaaagaaaagatatatttatagaaaggatacattaaaaagagatggacttaagagtaggaaggaaatttcgtattggcaggaagattgggagtggttcctttggtgacatttaccacggcacgaacttaattagtggtgaagaagtagccatcaagctggaatcgatcaggtccagacatcctcaattggactatgagtcccgcgtctacagatacttaagcggtggtgtgggaatcccgttcatcagatggtttggcagagagggtgaatataatgctatggtcatcgatcttctaggcccatctttggaagatttattcaactactgtcacagaaggttctcctttaagacggttatcatgctggctttgcaaatgttttgccgtattcagtatatacatggaaggtcgttcattcatagagatatcaaaccagacaactttttaatgggggtaggacgccgtggtagcaccgttcatgttattgatttcggtctatcaaagaaataccgagatttcaacacacatcgtcatattccttacagggagaacaagtccttgacaggtacagctcgttatgcaagtgtcaatacgcatcttggaatagagcaaagtagaagagatgacttagaatcactaggttatgtcttgatctatttttgtaagggttctttgccatggcagggtttgaaagcaaccaccaagaaacaaaagtatgatcgtatcatggaaaagaaattaaacgttagcgtggaaactctatgttcaggtttaccattagagtttcaagaatatatggcttactgtaagaatttgaaattcgatgagaagccagattatttgttcttggcaaggctgtttaaagatctgagtattaaactagagtatcacaacgaccacttgttcgattggacaatgttgcgttacacaaaggcgatggtggagaagcaaagggacctcctcatcgaaaaaggtgatttgaacgcaaatagcaatgcagcaagtgcaagtaacagcacagacaacaagtctgaaactttcaacaagattaaactgttagccatgaagaaattccccacccatttccactattacaagaatgaagacaaacataatccttcaccagaagagatcaaacaacaaactatcttgaataataatgcagcctcttctttaccagaggaattattgaacgcactagataaaggtatggaaaacttgagacaacagcagccgcagcagcaggtccaaagttcgcagccacaaccacagccccaacagctacagcagcaaccaaatggccaaagaccaaattattatcctgaaccgttactacagcagcaacaaagagattctcaggagcaacagcagcaagttccgatggctacaaccagggctactcagtatcccccacaaataaacagcaataattttaatactaatcaagcatctgtacctccacaaatgagatctaatccacaacagccgcctcaagataaaccagctggccagtcaatttggttgtaagcaacatatattgctcaaaacgcacaaaaataaacatatgtatatatagacatacacacacacatatatatatatatattattattattatttacatatacgtacacacaattccatatcgagttaatatatacaa

SEQ ID NO: 3140 - DNA, 2606 bp, Saccharomyces cerevisiae
ttatttctatagcttgccctatcatccatttgatcaacaatagggaataactgtaacagtaagtaaattatggatggttttcgtgtagctggtgcgttagtagttggtgcgttaaccgctgcatatttatattttggcggaaggttttcgatagcgctggtcattatagtaggttatggtatttattgcaatgaagccagcggtggtagtcaagatagtcaagagaagctcgatttgaacaaacaacagaaaaagccatgttgcagtgataagaagattgcggatggaggaaaaaaaactggcggatgttgttctgataagaagaacggtggtggtaaaggtggaggatgctgttcctcaaaaggtggaaagaaaggggggtgttgttcatctaaaggtggaaagaaaggaggatgttgttcctctaaaaagaatattggtgacaatgaaaatactgccactgaagttgagaaagccgtaaattaccctgttactgtggattttacagaagtttttaggaagcccactaagaaaaggtcgagtacccccaaggttttttcgaaaaatagctcgtctaactctagagtaggtaaaaaattaagtgtttcaaagaagataggtccagatggattgatcaagagcgcgttgactatttcgaatgaaacgcttttgagttcacagatctatgtgttatatagttccctgcaaggtgcagcttcgaaagctgcaaagagcgtttacgacaaactaaaggaattggatgaattgactaatgagccaaaacttttgaaccttgacgatctatccgatttcgatgactattttataaatgttcccgttgaaaatgcattgtatgtgcttgttttaccgtcttatgatatcgattgccctctagattatttcttacaaactcttgaagagaatgcgaatgattttagagtagatagtttcccattacgaaaattggttggctacacagttttggggcttggtgattcagaatcatggcctgaaaagttttgttatcaagccaaaagggccgatcactggatttctcgtttaggtggcaggagaattttccccttaggcaaagtttgtatgaaaacaggaggtagtgccaaaatcgatgagtggacatcattgttagcagagactttgaaagatgatgaaccaattatttatgagtatgatgaaaacgcagactctgaggaagatgaagaagaaggtaatggtagtgatgaattaggcgatgtagaagatattggtggtaagggtagtaatggaaagttttcaggcgcagatgaaatcaaacaaatggtggcgaaagacagtccaacgtacaagaacttgacaaagcaaggttacaaagttattggttcccattcaggcgttaagatctgccgatggactaagaatgaactacgtggtaaagggtcttgttataaaaaatcgctcttcaatatcgcgtccagtagatgcatggaattgactccttctttggcatgttcatccaaatgcgttttctgttggaggcatggtacaaatcccgtgtcaaaaaactggagatgggaagtagatgaaccagaatacattctagaaaatgctctgaagggacactattccatgatcaaacagatgagaggtgtgcccggtgttattgcagaaagatttgcgaaagcgtttgaagttcgtcattgtgccttgtctcttgtcggcgagcctattctttatcctcatatcaataaatttatccaattattacaccaaaagggcataactagtttccttgtgtgcaatgcccaacatccagaggccttgagaaatattgttaaagtaacacaattatatgtttctattgacgcacccaccaagacagagctgaaaaaagtggatagacctttgtacaaagatttctgggagagaatggtagaatgcttagagattttgaaaactgtacaaaaccatcaaaggacagttttcaggttaactttagtgaaaggtttcaatatgggtgatgtcagtgcatatgcagatctggtccaacgtggtttaccaggtttcattgaagttaaaggcgccacgtttagtggctcatctgatgggaatggtaatcctttgacaatgcagaatattccattttacgaggaatgtgtaaaatttgtgaaggcgtttaccacggaattacaaagacgtggattacattacgacttggctgccgaacatgcgcattccaactgtttattaattgcagacacgaaattcaaaattaatggagaatggcatacacatatcgattttgataaatttttcgtattgctaaactcgggcaaagacttcacgtacatggactatttagaaaagacacccgaatgggcattgtttggcaatggtgggtttgcaccagggaatacaagagtgtacagaaaagataagaaaaagcagaataaggaaaatcaagaaactacaacgagagagacgcctctccctcctattcctgcttaaaagatactggtatatattaagagtaatatcacgtatatatatatatatatatatatttattcgaaataaagagcagaacaattcaagtgttcaattagtatgaa

SEQ ID NO: 3141 - DNA, 1818 bp, Saccharomyces cerevisiae
atagatacaagagaagactatcatgtcatcagatgcgttaaaagcactacttcagtggggtgcgtcatttggtgtaatagtgccagaggaactcaagtttttatataccgatcttaagggcattatttgcgtatgtgaaaaagatatagacaatcccagcatcaagattcctcccgagattgtcatttcaaggaatctgcccatgaagttttttgggctaagtgaatccactaagaatatcaacggatggctgaagttgttcttcgcaaaaataaaatttgatagggataatgatactatcgtggacaatgttcgtgtgaatgataaatttaaaccttacttggatgcattgccttcccgcctaaattcgcccttggtctggaacccaagcgagttgaagcgtttatcatctacaaacatagggaattcgattcatgaaaagttcgaaggtatatttaaagagtggtttgaactggtcagttcttcagatatgtttgacttggaaagagtggcagatgatgtgcagaccttccataatctcgatgagttgacatatgaggctttgtatgagaagattttgaagataacagaacttcaaagaccaactatctggtattcttttcctgcatttttatggtcgcaccttatattcatttcaagagcattccctgaatatgtgctaaacagaaactgtcctgacaactctattgtactgcttcccatcgtcgatcttctaaatcatgactaccgttccaaagtcaaatggtatcctgaaaatgggtggttctgttatgaaaaaatcggtaccgcctcccaatcacgagaactatcaaataattatggcggtaagggaaatgaggagttactctctggatatggatttgttttagaagacaacatatttgactcagtggctttgaaagttaaattgccattagatgtggtatctacaattcttgaaacagaacctagtttgaagctgcccttactttcggattacaccacttatgcttttgaaaacaaagactgtgtccagcaagaaaagaaggctactcgtagtgctacagactacatcaatggggtgacttacttcattaacatacaaaatgaacaatgtttagaaccattactggatctttttacctacctttctaaggccgaagaggaggatctacacgatttgagagcccgtttgcagggtatacaaatgctacgaaatgcattgcagagcaaactcaacagcattactggaccacctgcaactgatgactcttatgcaattgatccttacagagtctattgtgctgacgtttatactaaaggtcaaaaacaaattttaaaagaggctttaacgaggttgaaaaaactagaaaaaacaatgctgtcagagaacaagcaccaattgctaaccatgagcaaaattcttaagaatgaccctgcttttgcagaaactgaattaccttcgctgttcagcaacgaagatggtgaagaggtcatctttgaatctacttatgatttattgatactttggattctactgaaaacgaaaaagaattcttaccccaccaaatatgaatgggttggacagcagtatactaatttcaagcaaactgcatatatttcagatgatgccaaggctttccatactgcatacttcgagaagcaagacgatgtggatttggccgaagtagatcatgcgattcagtttgtagtagacaattcctttaccagaacttcatctacaaccgaagagactattttagtacgtaagtagcttttccttatagaatgttagagtagagtacgtaattacatctg

SEQ ID NO: 3142 - DNA, 708 bp, Saccharomyces cerevisiae
aaccattgagggaaactatagttaggtgcaataatgagacagctaacagaagaagagaccaaggttgttttcgaaaaactcgccggctatattggtagaaatatttcttttttagtggataataaagaacttcctcatgtcttcagattacaaaaggatagagtatattacgtacccgatcatgttgcaaaattggctactagtgtagcaagacctaacttgatgtctctgggtatttgtttaggtaaattcacgaaaactggaaaattcaggttacatattacttctttgacagtattggctaagcatgccaaatataagatatggattaaacctaatggggagatgccattcttatacggtaatcatgtgttaaaggcacatgtgggtaaaatgtctgatgatataccagaacacgccggtgttattgtgtttgcaatgaatgatgtgccattagggttcggtgtcagtgcgaaaagtacttctgagtcaagaaacatgcaacccactggtatagttgctttcagacaagcagatattggtgagtatttgagagatgaagacaccttgtttacttagtgggaaggactgatgatgaattcccgtgtacatttcacttacagcttgcgttatctctcacaatgtatttttttctgtataataaagaatcatataattagcgcttaaaaggaaagagttgttcgataa

SEQ ID NO: 3143 - DNA, 1186 bp, Saccharomyces cerevisiae
tctcttcagctattccaacacttgatgatgtcagtcaatagatttacttcaggtcgactccctgttttccttagaaagtcccctttttactactcgagagcttatttgcatcaaacatgtgttttcaagcaaaataaagaaactgcacaagattcgccagagcttttagcaaaaagctcacatctgaattcgaaaccactagatgtaagcaataaagcaccagtgaaaactgctcagaataaaattcctctagctcatagtaaatatgaatcgtcaaagtacgaacttcccaaatggaaagaagccttgggtgaactagtaattcgagcatttcatttagatatggatagagtgagggcagggcccgttgcaggatcttactattataaaatttgtaaagagcaaggtttacaatacgaggacgagccattatcagaaactgctaaatacttttacgaggatttgaagctaccacgtactttttcacaatggtttcaaatcactgtattgcacgagtggatactttttgtacgtatgagagccatgcctttcaaatacggcagaaactatcagcagaaattggtagatagaacattttctgacattgagctgagattattcgaggaaatgaaagttaattctggtagaatcgcagatcaatatttgaaagatttcaatacgcaattaagaggagcgatatttgcatatgatgaaggatttgctacagatgatggtacacttgcgacagctgtctggagaaatctttttggtggaagaaagaacattgatatggttcatttagagtctgttgtgagatacatttattctcaactatatgttctaagcaggttatcagacagagagtttgccacaggtaaattcaagtttgttcctcctggggtgaaggtcgaaaaactgacaccaaagcaagaggaagagttgaaggccaagaccattgcaaaatatgaagctctagacaaggatcctaaaaccttaccaagcgagagaagtaggctgtcatatacaaactaaacgagctagtttgtaacttcaaaacttatgaaaacacttatttattcttcagatactatccgcacaaattccttaagttttttccaattttttgggctttcttccttatttaatcagtttataaaatcattacgttgtaaatagtttatttgaa

SEQ ID NO: 3144 - DNA, 689 bp, Saccharomyces cerevisiae
cttcttttctagaaacatcattataactaacaatatataattggaataatggctggttgggatatttttggttggttcagagatgtgttggcttcccttggtctgtggaacaaacatggtaaactacttttcttgggtttggataatgccggtaagaccacattgctacatatgttaaagaacgatagattggcaaccttacaaccaacatggcatccaacttctgaagaactggctattggtaacattaagtttacaactttcgatttgggtggtcatattcaagctcgtcgtttatggaaggattatttcccagaagttaatggtatcgtctttttagtcgatgctgctgaccctgaaagatttgatgaagcacgtgtcgaattagatgctttattcaacattgccgaattgaaggacgttccttttgtaattcttggtaacaagatcgatgctccaaacgccgtttctgaagcggagctacgttctgctttaggattattgaataccactggctctcaaagaattgaaggtcaaagaccagttgaagttttcatgtgttccgttgttatgagaaatggttatttagaggcgttccaatggttatctcaatatatttaattgacgtatacatctataccctttatatgacattcacatgaattcaacagctttgtaataatcaacaa

SEQ ID NO: 3145 - DNA, 826 bp, Saccharomyces cerevisiae
tagaacatgtttcattgatattggacgttactatttcaatttaacagtcaaccagtcgtccaaaaatgtccaagatcacttcttctcaagtcagagaacacgtcaaggaattgttgaagtattccaacgaaaccaagaagagaaacttcttggaaaccgtcgaactacaagtcggtttgaagaactatgaccctcaaagagacaagcgtttctctggttctttgaagttgccaaattgtccaagaccaaacatgtccatctgtatcttcggtgatgctttcgatgttgacagagctaagtcttgcggtgttgacgctatgtccgtcgatgacttgaagaagttgaacaagaacaagaagttaatcaagaagttgtctaagaagtacaacgctttcattgcttctgaagttttgatcaagcaagttccaagactattgggtcctcaattgtccaaggctggtaagttcccaaccccagtttctcacaacgatgacttgtacggtaaggtcactgatgtcagatctaccatcaagttccaattgaagaaggtcttgtgtttggctgttgccgttggtaacgttgaaatggaagaagacgttttggttaaccaaatcttgatgtctgttaacttctttgtttctttgttgaagaagaactggcaaaatgttggttccttggttgttaagtcctccatgggtccagctttcagattgtactaagcataattacgtgttttcatagtttaacgctttcagaactacttatttaattttgtaagaagtaatttgagtcacatttgtatttagtaaaagattaagagtatttc

SEQ ID NO: 3146 - DNA, 2576 bp, Saccharomyces cerevisiae
cgaccaaaaacggcgttaagaatgcaagtactagtgacgctctggtgtctaatatgcacatgcctggtactaccagtggccgccaagaaaaggacactgacagcgagttcactggtcacgtgcatggagaactcacagctttcagccaatagtttcgatgtgtcgttttctccagacgatcgatcgctacattacgatctggatatgaccacgcagatcgactcttacatctacgcttatgtggacgtgtatgcctacgggttcaagattattacggagaacttcgacgtgtgttcaatgggttggaagcagttttgccctgtgcacccaggtaacatacaaatcgactccattgaatacattgcccagaagtacgtgaaaatgattccgggaattgcctaccaagtgcccgatattgatgcgtacgtaagattgaacatttataacaacgtaagtgaaaatttggcttgtatccaggttttcttttccaatgggaaaactgtatcacaaattggggttaaatgggtgacagctgttatcgccggtattggtttattaacttccgctgtcttgtccaccttcgggaactccacagcagcatctcacatttctgcaaacaccatgtcactgttcttatatttccaatctgtcgctgtggtcgcaatgcaacatgtagacagtgttccacccattgctgctgcctggtctgaaaaccttgcctggtcgatgggcttgatccgtattacatttatgcagaaaatcttccgttggtatgtagaggcgactggaggctccgcatctctatatttgaccgcgacaacaatgtcagtgctcactcaacgaggtctggattaccttaaaaatacttcggtttacaagagggcggaaaatgtcttgtacggtaactcaaacactttaatctttcgaggaattaaaagaatgggataccgtatgaagattgaaaatacggccatcgtttgtactgggttcacattctttgtgctgtgcggttattttttggccgggtttatcatggcctgcaaatacagtatcgagttatgtataagatgtggttggatgcggagtgataggttttaccaatttaggaaaaactggaggtcagttctgaaaggatcgttgttaagatacatctatattgggttcacgcaactgacaattttaagtttttgggagttcactgaacgggattccgccggtgttattgttattgcatgcctattcattgtattgtcatgcgggttgatggcgtgggctgcgtacagaaccatttttttcgcaagtaaatctgtggaaatgtacaataacccagctgctttattgtatggtgatgagtacgtcttaaacaagtacgggtttttctacaccatgttcaacgcaaaacattattggtggaatgctcttttaacgacgtatattcttgtaaaagctttatttgtcggattcgcacaggcatcaggtaaaacgcaagcattggctattttcattattgacttggcgtattttgttgccatcatccgttataaaccatatttggaccgtccaacgaatattgtcaacatttttatttgcactgtcaccttggtcaactctttccttttcatgtttttctcaaacttgtttaaccaaaagtatgctgtctctgccatcatgggctgggtgtttttcattatgaatgctgcgttttctttgcttctactgttgatgattctggcctttaccacaatcattctgttttctaagaatcctgactccaggttcaagccagcaaaggatgacagagcatctttccaaaagcatgctattcctcatgaaggtgccttgaataagtcagtggccaacgaattaatggccctaggtaatgtggcaaaggatcataccgaaaattgggaatacgaactgaagagtcaagaaggtaaaagtgaagataatcttttcggagttgaatacgatgacgagaaaacaggaactaattcagagaatgctgaaagtagcagtaaggaaaccacccgtccaaccttttctgaaaaggttttacgttcattatcaatcaaaaggaataagagtaaactgggcagtttcaagcgcagcgctccggataagataacacaacaagaggtttctcctgaccgcgccagctcttcgcctaacagcaagtcataccccggtgtctcgcacaccaggcaagaatctgaagcgaataatgggctaatcaatgcatatgaagatgagcaattcagtctgatggaaccaagcatactggaagacgctgctagttccacccaaatgcatgctatgccagcccgagatttgagcttgagcagtgttgcaaacgcccaagatgttactaaaaaagcaaacatcctggatcctgattatttgtaagctttgtcgatgggataaaggtaaaaagaacaacgtaattaaatcattacgaaaactctactgcattattttttagtctttttatagagacatgaacattcaattactttcaaggataaatattctaatattcatattattcacttatgtatttttaacgaaactctactcca

SEQ ID NO: 3147 - DNA, 601 bp, Saccharomyces cerevisiae
ccacgacgaaacaatcatataacaatgtctacttttaatgcagaaaccgctgataacttggaagatatcgagaaacaattcgctgttgttgctgttgaacaagcggaaacatattggaaactattaacaagtgttcccggttccaagttacgtttgactaagtttgatgacgaaatatacgagaattttatggagagattcccagaatacaaagatgttgaaagggtcaaaaagtttacggaggaagaattaaaaacaaaagaagccaaggaaagatggagaaagttcttcacaatttttgagaaaaaaatcgaagactataactttggtactttgttgaggacagacgcttcagccgagtatggtcaatttactacttgttttgtcgtgagactacaattttacgcttttgaaattgctagaaataaacacggcttgaacgattggattgtcggtcagaaatgaacatgcatatatatttgtgattgattatatagaatacattactttatacaaaggaacaacacaaggcattcttccttgttcaacatatatatatatacatatatatattaagctcagtaaattgttgaaatgtgaa

SEQ ID NO: 3148 - DNA, 3905 bp, Saccharomyces cerevisiae
gcataatttatatcttgtaaactgtaaatacaacgacaatcagtgctaattcaactcaggatgcctccaaagaagtttaaggatctaaactctttccttgacgaccaaccaaaggacccaaatctagtcgcttctcccttcggtggttattttaaaaaccctgctgctgatgccggtagtaataacgcttccaaaaaaagtagctaccaacaacagcgtaattggaaacaggggggcaactaccaacaaggtggttaccaatcgtataacagtaattacaacaattacaacaactacaacaactacaacaattataacaactacaataactataataaatacaatggccagggctatcaaaaatctacttacaaacaatcggctgtgacgcccaaccaaagtggaactccaactccatctgcttctactacatctttgacctctttgaatgaaaagctgtcgaacttagagttaacacccatctctcaatttttgtcaaagatacctgaatgtcaaagtatcactgattgcaaaaatcaaatcaaactaatcattgaagaatttggcaaagaaggtaacagtacgggtgagaaaattgaagagtggaaaatcgtcgatgttctatctaaattcatcaaacctaagaatccatcattagttagagaatctgccatgctaataatttccaacattgctcaatttttcagtggaaagccaccacaggaagcatacttgctaccattcttcaatgtcgcacttgactgtatttcagataaagagaatacagtcaaacgtgccgcgcaacatgccattgattctttgttgaattgctttccaatggaggctttaacctgttttgtactgcctacgattttggattacttatcatctggtgccaaatggcaagctaaaatggccgctctaagcgttgtagatagaataagagaagattcggcgaacgatttattggaacttactttcaaagatgcagttccagttttaaccgatgtagcaactgatttcaaacctgaattggccaaacaaggttacaaaactttattggactacgtttctattttggataacttagatttgtctcctcgttataaattgatcgtggacaccctgcaagatccatctaaggttcctgaatctgtaaaatcgttatccagtgttacatttgtcgctgaagttacggaaccttcactatctttgttagttcctattctaaacagatctttaaacctatcgtcatcatctcaagagcaattaagacaaaccgttattgtcgtggagaatttgacaagattggtgaataatcgtaatgaaattgaaagcttcatccctctactactacccggtatccaaaaggttgttgatactgcgtccttacctgaagttcgtgaattggctgaaaaggcccttaacgttctaaaagaagatgacgaagctgataaggaaaacaaattctcaggcagactgactttagaagaaggtagggatttcttacttgatcacctcaaggacattaaagctgatgattcctgttttgtcaagccttacatgaatgacgaaactgttatcaagtatatgagcaagattttgaccgtggattctaatgtgaacgactggaaaagacttgaagattttttgaccgccgtttttggtggttcagattcacaaagagaatttgtcaaacaagactttatccataacttgagagctttattctaccaagaaaaggaaagggcagatgaggacgaaggtattgagattgtcaacactgatttctccttagcttatggttcaagaatgcttttgaacaaaacaaatcttcgtctcctaaagggtcatcgttacggtttgtgtggtagaaatggtgctggtaagtctactttaatgagagcaattgctaatggtcaattggatggttttcctgacaaggatacattacgcacctgtttcgtcgaacataaattgcaaggtgaagaaggtgatttagacttggtttccttcattgctttagatgaagaactgcaatctacttctcgtgaggaaattgcagccgctttagaatctgtcggttttgatgaagagagaagagcacaaactgttggatctttatctggtggttggaaaatgaagttggaattggcaagagctatgttacaaaaagctgatattttattgctggatgaacctaccaatcatttagatgtttcgaacgttaaatggttagaagaatacttactggaacatactgatattacttcattgattgtttcgcatgactctggtttcttagatacagtctgtactgacatcatccattatgaaaacaagaaattggcttactacaaaggtaacttggcagcatttgttgagcagaaacctgaagctaaatcttactataccttaacagattctaatgctcaaatgcgtttcccacccccaggtattttaacaggtgttaagtctaacactagagccgtcgctaaaatgactgatgtaactttctcttatccaggtgcccaaaagccttccttaagccatgtctcctgttcattgtctctgtcttctcgtgtggcttgtttaggtcctaacggtgctggtaaatccactttgatcaagctattaactggtgaattggttccaaatgaaggtaaagtggaaaaacatccaaatttacgtattggttatattgctcagcatgcattgcaacacgtcaatgaacataaggaaaagacggcaaaccaatatttgcaatggcgttatcaattcggtgacgaccgtgaagtcttattgaaggaatccagaaaaatatccgaagatgaaaaggaaatgatgacaaaggaaatcgacattgatgacggtagaggtaagagagccattgaagctattgtaggtagacaaaagttgaaaaaatctttccaatatgaggtcaaatggaaatactggaaaccaaaatacaactcctgggttccaaaagatgttttggtcgagcatggctttgaaaaattggttcaaaaattcgacgatcacgaagcctccagagaagggttgggttaccgtgaattaattccttcagttatcaccaaacattttgaagacgttggtcttgattctgaaattgctaaccatactccattaggttctttatctggtggtcaattagttaaagtcgttattgccggtgctatgtggaacaaccctcatttacttgttttggatgaacctaccaactatttggacagagactctcttggtgctttggccgttgctattcgtgactggagtggtggtgtcgttatgatttcgcataataacgaatttgttggtgctttatgtcctgaacaatggattgtggagaacggtaaaatggttcaaaagggctctgcacaagttgaccaatccaaattcgaagatggtggtaatgctgatgccgttggtctaaaggcctccaacttggccaagccatctgtagatgacgatgattctccagctaacatcaaggtcaagcaaagaaagaagagattgacaagaaatgaaaagaagctgcaagccgaacgtcgtcgtctacgttacattgagtggttgtcatcgccaaaaggtacaccaaaaccagttgatactgacgatgaagaagattgaaagcctactggctagtgttttatcttcgctaacttcgtttgtttcactccatcttttttctttaattcactcctcaaatggagtttactacgttgatagaatttaggacaagcatatgacgctctccttccttttttgttttctaggttaattcatttttcatacagagtagttaatattggttcttttcatatatgtacggtacgcagattaattatgtaaacttaaacttaagggatcctttttgatgctaa

SEQ ID NO: 3149 - DNA, 5830 bp, Saccharomyces cerevisiae
tcaccactgtcgtgcttttctaataaccgctatattagacgtttaaagggctacagcaacaccaattgaaataccatcattatgaagccggaagttgagcaagaattagctcatattttgctaactgaattgttagcttatcaatttgcctctcctgtgagatggattgaaactcaagatgtttttttgaaggattttaacactgaaagggttgttgaaatcggtccttctccaactttggctgggatggctcaaagaaccttgaagaataaatacgaatcttacgatgctgctctgtctttacatagagaaatcttatgctattcgaaggatgccaaagagatttattataccccagatccatccgaactagctgcaaaggaagagcccgctaaggaagaagctcctgctccaactccagctgctagtgctcctgctcctgcagcagcagccccagctcccgtcgcggcagcagccccagctgcagcagctgctgagattgccgatgaacctgtcaaggcttccctattgttgcacgttttggttgctcacaagttgaagaagtcgttagattccattccaatgtccaagacaatcaaagacttggtcggtggtaaatctacagtccaaaatgaaattttgggtgatttaggtaaagaatttggtactactcctgaaaaaccagaagaaactccattagaagaattggcagaaactttccaagataccttctctggagcattgggtaagcaatcttcctcgttattatcaagattaatctcatctaagatgcctggtgggtttactattactgtcgctagaaaatacttacaaactcgctggggactaccatctggtagacaagatggtgtccttttggtagctttatctaacgagcctgctgctcgtctaggttctgaagctgatgccaaggctttcttggactccatggctcaaaaatacgcttccattgttggtgttgacttatcatcagctgctagcgctagtggtgctgccggtgcaggtgctgctgccggtgcagctatgatcgatgctggcgctctggaagaaataaccaaagaccacaaggttttggcgcgtcaacaactgcaagtattggctcgttatctaaaaatggacttggataacggtgaaagaaagttcttgaaagaaaaggacactgttgctgaacttcaagctcagttggattacttgaatgccgaattaggtgaattctttgttaacggtgttgctacttctttctctagaaaaaaggccagaaccttcgattcttcctggaactgggctaaacaatctttattatcattatactttgagataattcatggtgtcttgaaaaacgttgatagagaggttgttagtgaagctatcaatatcatgaacagatctaacgatgctttgattaaattcatggaataccatatctctaacactgatgaaacaaaaggtgaaaactatcaattggttaaaactcttggtgagcagttgattgaaaactgtaaacaagttttggatgttgatccagtttacaaagatgttgctaagcctaccggtccaaaaactgctattgacaagaacggtaacattacatactcagaagagccaagagaaaaggttaggaaattatctcaatacgtacaagaaatggcccttggtggtccaatcaccaaagaatctcaacctactattgaagaggatttgactcgtgtttacaaggcaatcagtgctcaagctgataaacaagatatttccagctccaccagggttgaatttgaaaaactatatagtgatttgatgaagttcttggaaagctccaaagaaatcgatccttctcaaacaacccaattggccggtatggatgttgaggatgctttggacaaagattccaccaaagaagttgcttctttgccaaacaaatctaccatttctaagacggtatcttcaactattccaagagaaactattccgttcttacatttgagaaagaagactcctgccggagattggaaatatgaccgccaattgtcttctcttttcttagatggtttagaaaaggctgccttcaacggtgtcaccttcaaggacaaatacgtcttgatcactggtgctggtaagggttctattggtgctgaagtcttgcaaggtttgttacaaggtggtgctaaggttgttgttaccacctctcgtttctctaagcaagttacagactactaccaatccatttacgccaaatatggtgctaagggttctactttgattgttgttccattcaaccaaggttctaagcaagacgttgaagctttgattgaatttatctacgacactgaaaagaatggtggtttaggttgggatctagatgctattattccattcgcggccattccagaacaaggtattgaattagaacatattgattctaagtctgaatttgctcatagaatcatgttgaccaatatcttaagaatgatgggttgtgtcaagaagcaaaaatctgcaagaggtattgaaacaagaccagctcaagtcattctaccaatgtctccaaaccatggtactttcggtggtgatggtatgtattcagaatccaagttgtctttggaaactttgttcaacagatggcactctgaatcctgggccaatcaattaaccgtttgcggtgctattattggttggactagaggtactggtttaatgagcgctaataacatcattgctgaaggcattgaaaagatgggtgttcgtactttctctcaaaaggaaatggctttcaacttattgggtctattgactccagaagtcgtagaattgtgccaaaaatcacctgttatggctgacttgaatggtggtttgcaatttgttcctgaattgaaggaattcactgctaaattgcgtaaagagttggttgaaacttctgaagttagaaaggcagtttccatcgaaactgctttggagcataaggttgtcaatggcaatagcgctgatgctgcatatgctcaagtcgaaattcaaccaagagctaacattcaactggacttcccagaattgaaaccatacaaacaggttaaacaaattgctcccgctgagcttgaaggtttgttggatttggaaagagttattgtagttaccggttttgctgaagtcggcccatggggttcggccagaacaagatgggaaatggaagcttttggtgaattttcgttggaaggttgcgttgaaatggcctggattatgggcttcatttcataccataacggtaatttgaagggtcgtccatacactggttgggttgattccaaaacaaaagaaccagttgatgacaaggacgttaaggccaagtatgaaacatcaatcctagaacacagtggtatcagattgatcgaaccagagttattcaatggttacaacccagaaaagaaggaaatgattcaagaagtcattgtcgaagaagacttggaaccatttgaggcttcgaaggaaactgccgaacaatttaaacaccaacatggtgacaaagtggatatcttcgaaatcccagaaacaggagagtactctgttaagttactaaagggtgccactttatacattccaaaggctttgagatttgaccgtttggttgcaggtcaaattccaactggttggaatgctaagacttatggtatctctgatgatatcatttctcaggttgacccaatcacattattcgttttggtctctgttgtggaagcatttattgcatctggtatcaccgacccatacgaaatgtacaaatacgtacatgtttctgaggttggtaactgttctggttctggtatgggtggtgtttctgccttacgtggtatgtttaaggaccgtttcaaggatgagcctgtccaaaatgatattttacaagaatcatttatcaacaccatgtccgcttgggttaatatgttgttgatttcctcatctggtccaatcaagacacctgttggtgcctgtgccacatccgtggaatctgttgacattggtgtagaaaccatcttgtctggtaaggctagaatctgtattgtcggtggttacgatgatttccaagaagaaggctcctttgagttcggtaacatgaaggccacttccaacactttggaagaatttgaacatggtcgtaccccagcggaaatgtccagacctgccaccactacccgtaacggttttatggaagctcaaggtgctggtattcaaatcatcatgcaagctgatttagctttgaagatgggtgtgccaatttacggtattgttgccatggctgctaccgccaccgataagattggtagatctgtgccagctccaggtaagggtattttaaccactgctcgtgaacaccactccagtgttaagtatgcttcaccaaacttgaacatgaagtacagaaagcgccaattggttactcgtgaagctcagattaaagattgggtagaaaacgaattggaagctttgaagttggaggccgaagaaattccaagcgaagaccaaaacgagttcttacttgaacgtaccagagaaatccacaacgaagctgaaagtcaattgagagctgcacaacaacaatggggtaacgacttctacaagagggacccacgtattgctccattgagaggagcactggctacttacggtttaactattgatgacttgggtgtcgcttcattccacggtacatccacaaaggctaatgacaagaacgaatctgccacaattaatgaaatgatgaagcatttgggtagatctgaaggtaatcccgtcattggtgttttccaaaagttcttgactggtcatccaaagggtgctgctggtgcatggatgatgaatggtgctttgcaaattctaaacagtggtattattccaggtaaccgtaacgctgataacgtggataagatcttggagcaatttgaatacgtcttgtacccatccaagactttaaagaccgacggtgtcagagccgtgtccatcacttctttcggttttggtcaaaagggtggtcaagctattgtggttcatccagactacttatacggtgctatcactgaagacagatacaacgagtatgtcgccaaggttagtgccagagagaaaagtgcctacaaattcttccataatggtatgatctacaacaagttgttcgtaagtaaagagcatgctccatacactgatgaattggaagaggatgtttacttggacccattagcccgtgtatctaaggataagaaatcaggctccttgactttcaactctaaaaacatccaaagcaaggacagttacatcaatgctaacaccattgaaactgccaagatgattgaaaacatgaccaaggagaaagtctctaacggtggcgtcggtgtagatgttgaattaatcactagcatcaacgttgaaaatgatacttttatcgagcgcaatttcaccccgcaagaaatagagtactgcagcgcgcagcctagtgtgcaaagctctttcgctgggacatggtccgccaaagaggctgttttcaagtccttaggcgtcaagtccttaggcggtggtgctgcattgaaagacatcgaaatcgtacgcgttaacaaaaacgctccagccgttgaactgcacggtaacgccaaaaaggctgccgaagaagctggtgttaccgatgtgaaggtatctatttctcacgatgacctccaagctgtcgcggtcgccgtttctactaagaaatagagagagcactacgtagtccctcttttaatatgtaacgtgtcgcttctatttatcagacataatagtaattactttgttatttttc

SEQ ID NO: 3150 - DNA, 1131 bp, Saccharomyces cerevisiae
cgtcaagaaccaaatcaagtcaaatcgtggaagttacaaggggaaagaccaataacttttagtaaagaacaaagaaaggtctatctcacgcagtgacggtctttgcggtaaatctgtgtatacttgaaagaaaacccttttacaattaaaaaaggcaattaaaaatagaaacaaatcaaatgagttataataatccgtaccagttggaaaccccttttgaagagtcatacgagttggacgaaggttcgagcgctatcggtgctgaaggccacgatttcgtgggcttcatgaataagatcagtcaaatcaatcgcgatctcgataagtacgaccataccatcaaccaggtcgattctttgcataagaggctactgaccgaagttaatgaggagcaagcaagtcacttaaggcactccctggacaacttcgtcgcacaagccacggacttgcagttcaaactgaaaaatgagattaaaagtgcccaaagggatgggatacatgacaccaacaagcaagctcaggcggaaaactccagacaaagatttttgaagcttatccaggactacagaattgtggattccaactacaaggaggagaataaagagcaagccaagaggcagtatatgatcattcaaccagaggccaccgaagatgaagttgaagcagccataagcgatgtagggggccagcagatcttctcacaagcattgttgaatgctaacagacgtggggaagccaagactgctcttgcggaagtccaggcaaggcaccaagagttattgaaactagaaaaatccatggcagaacttactcaattgtttaatgacatggaagaactggtaatagaacaacaagaaaacgtagacgtcatcgacaagaacgttgaagacgctcaactcgacgtagaacagggtgtcggtcataccgataaagccgtcaagagtgccagaaaagcaagaaagaacaagattagatgttggttgattgtattcgccatcattgtagtcgttgttgttgtcgttgttgtcccagccgttgtcaaaacgcgttaattccaactattttctatatttctattctatccgaactccccttttgtatatcaatatatcttaatactttcgcctattc

SEQ ID NO: 3151 - DNA, 1575 bp, Saccharomyces cerevisiae
gagaaagaagttcagttagttgaagccagcaatactactttctctagcagtctagcacaagttactttgaaaggaaataaaaaaaattgtcagcatgtcgattcaaactagtgatccaaatgaaacatcagatttaaagtcgttatctttaattgctgcccactcccatattacaggtttaggtctagatgaaaacttgcaaccacgtcccacatccgaaggtatggttgggcaattgcaagcccgtcgtgctgctggtgtgatattgaaaatggttcaaaatggcaccatagcaggtagggctgttttggtagcgggccccccttcaactggtaagaccgctcttgccatgggtgtttcccagtctctgggtaaagatgtaccattcactgctattgcgggctcagaaatcttttctttagaattgagtaaaactgaagcactaactcaagcttttaggaaatccatcggtatcaaaatcaaggaggagacagaattgattgaaggtgaagtcgtggaaattcaaattgatagatctattactggtggacacaaacaaggaaaattgactattaaaactaccgatatggaaacaatttatgaattaggcaataaaatgattgatggcctaactaaagaaaaggtattggctggcgatgttatttctattgataaagctagtgggaagattaccaagctaggcagatcctttgctagatctagggattatgatgccatgggtgctgataccagatttgttcaatgtccggaaggcgaactgcaaaaaaggaaaacagtggttcacacggtgtcactgcatgaaattgatgttattaattcaagaacacaaggatttttggcattatttactggtgacaccggtgaaattaggtcagaggtaagagaccagataaacacaaaagtggcagaatggaaagaagaaggtaaagcagaaattgttcctggtgtattatttatcgacgaagtccacatgttggatatagaatgtttttcctttataaatagggctttggaagatgagtttgccccaatcgtcatgatggctacaaatagaggagtttccaaaaccagagggactaattacaaatctccacatgggttacctctcgatcttttggataggtcaattattattacaactaaaagttataatgagcaggagattaagacaattttatctataagagcacaagaggaggaagttgaactgtcatccgatgccttagatctattgaccaaaacaggtgtggaaactagtttgcgttacagcagtaatttaatctctgttgctcagcaaattgcaatgaagagaaaaaacaacactgttgaagtggaagatgtcaaaagggcttatttgctatttttggacagcgctagatctgttaagtatgttcaagagaacgagtcacaatatattgatgatcagggcaacgttcaaatatccattgctaaatcagcagaccctgatgccatggatactacggaataagcattttgtactttaaggcagaaattgcatcaaatatatatgtataaataaaaattttatgtttg

SEQ ID NO: 3152 - DNA, 967 bp, Saccharomyces cerevisiae
atgtcctccgatttagctgctgagttaggattcgaccctgcactaaagaagaaaaagaagactaagaaggtgatcccagatgattttgatgctgccgtaaacggcaaagaaaatggttcaggagatgatttatttgccggattaaaaaagaaaaagaagaagtccaagagcgtttctgccgatgctgaagctgaaaaagagcctactgacgacatagcagaagccttgggtgaactatccttgaagaagaaaaagaaaaagacaaaggacagcagtgtagacgcgtttgagaaagaactagctaaagctggtctagataatgtggatgctgaaagcaaagaaggcactccaagtgctaattccagcattcaacaagaagttggcctaccttattcagagttattatctagatttttcaatattctaagaactaacaatccagaacttgctggtgatagaagtggtccaaagttcagaattcctcctcctgtttgtttgcgtgatggtaagaagactattttctcgaatatccaagatatcgccgaaaaattgcatagatctccggaacatttgattcaatatctcttcgcagaattaggtacgtccggttctgttgacggtcagaaaagattagtcattaagggtaagtttcaatccaaacaaatggagaatgtcttaagaagatacattttggagtatgtcacttgtaaaacttgtaagagtattaacaccgaattgaagagagaacagtcaaacagactgttctttatggtctgtaaaagttgtggttctaccagatccgtctcttctattaaaaccggtttccaagctaccgttggtaagagaaggagaatgtgatgttggtgctttacctgttagcatatatataataaatacggatttcgtttatcttgtgtattttattcgtttcattagatatttaatgtttaaatgaagaaaaacttaa

SEQ ID NO: 3153 - DNA, 878 bp, Saccharomyces cerevisiae
tgagttaattatcatttgtgtaaaacaaaaacgaattgtaatacgataggcaaaattgttcgcgctctatctcaaagaaagtaattatttccaaatagaaaaaaaaaatctacatatacgcagatatgggcctacacagtgaaccgttagatcaagaggaccaagacaccataatactcgatgcaagagctggcgatttggattctctgaaagatatatttacaactttagtcagtcccgagttactttcgacttgtaaggaaagtgaatctgattctacggctttacatatggctgctgccaacggtcatatagagaccgttcggtatatactggagacggtttctcgcgcaaatagtgccgaagacttgaaagcttttgttaatgaggtgaacaaaacaggcaacacggctttacattgggcgtcgttgaatggcaaattagacgtggtcaagctactgtgtgatgaatatgaggcagacccctttattagaaacaaattcggccacgatgctatctttgaggccgagaacagcgggaaggaagaagtggaaacatactttttgaagaagtatgatgtcgaacctgaagatgatgaagaagacacacaaactgagggcaagaattcggtccaaatcacaaagggtacagaaattgaacaagtcaccaaggaagccaccgaggctttaagagaagaaaccgagaaactgaatataaataaagactaaagtaaagagcttgttttcttcgtggaataaaagccgtaatatccattgagcatgatattttatttcttggtaccggagaagataaaaggatggaaccagcagaaatgcattaataaatacaaaaaatttagaaaagagttacagtaataa

SEQ ID NO: 3154 - DNA, 1995 bp, Saccharomyces cerevisiae
tgagcatcaaagtgatcaattgtattatattacagtgtaattttctttttttccatattgaatcaaaaactagccacgcttgaaactaaagatggttgcctattctccaatcattgccacctatggtaatcgtgcagaacagtttttagaaacagactcagacttcgctaagtatcatgcgaaattgaataaaaagttgcaacacttgaggagccgttgccatttggtcaccaaggatacaaagaaatactcaagtaaaaataagtatggcgaaattaactccgaggattatgataataaaactaaattgattggtgttttgattttactacacgctgaaagggacttggcactggctgaaactttgaaattgagagctcgtcaaagaggaaagttaaagaaaagtgaagaaaaggttttatccacaagattgaagaaggcctgcaagactgctgataaattggttaacgtcactcaaaatgaacagcaatggataactcgtgcccaatatttagcgttcgctaaattggtacattcagagtacctaattaatggaaaaaggttcaagaggaaggacaatgccaaaatttcgaacaacctagccctcgttttcgccgcattggaacacttgaagaatctaagcttattagctgaagaagttgtagataacattgttaataaataccagtactctctcaagcagtacgcgggaaatttaattacaacgcccgaaataaataactttatcgtggaaagagttcaatctgatgagaacaaggacgatgagcttgtgaaattgttattagacaatggattcaatatgaaaaaaattacaacctcaactgaagatcaaaaggttaccactaacataaactggagatctttcaacgccaagataatcgatgctgaagttgctcaatttttggaacaaggtctatctatccacccaactcagattactcaatatacacagaggctatcaaaattggagaaagctttagaccgtcatgaatttttcatcgcaaaccacgacgatcaagatgacatagacgagatggttgaaaatagttctgaaaacaatcagataattttagcctacattaaatataatattcttttgacctctatatctcgtgaaagagatttgtttactcatttatggaatcaatggctgaaattaaatacttcattaccatcgaagttaaccaaatataaagaaatggaacgtattgtgaagaatttgacaaaatatttatcggacataatggagctacctggtgtgtattcagatgacgagctgctaagccaattagacttatgcaagctgtatttccagttatttctgaatacgggctgcctgagtgttttatatcagtcgaaaggcagatatatggaggcgttagctctatatgtggacgcttaccgaagattagaaaacaaattatctgaaattgaatctctagacgaaatcttacttccagcaaatcttttgtcattgaattctgtccgaagcttacaaaagagaatcgaaaacggtggtaatagtgtcattactttggcggaatacgaaaaaagaaatcatggtggcagcttagggaaatatgatttgacagtgattgaaaaattggatagtaaaaaaatactgccaacggacatacaattgaaaaatttattccctctcaagccaaaaatgctgcccattcctagtaaaccaacactttttgatttggccttcaactacataacatatgataagcaagagccctcagcttctcaagtgaaagattcagtcacagaaaccgagagcatctctcaaacaccaatttctaatgagcagacggaaggagagcctaaaaagaagcgtggtttcttgggcctatttggtcgttaatatttttctagtatgactgtatttatagtactatatagattattccatttaaacaaatgatgattgccaactatagtagccaaataacgaagtgcattacttaa

SEQ ID NO: 3155 - DNA, 1477 bp, Saccharomyces cerevisiae
catctttcttggcgacccggtagtagcatttaacttccattagaaccatataaaatgcatgggcctacttcaaaagctatttcccgcaatgtgagaagcgtgaagagaccaagaagagcacctaggcccgtggtctccacgcaggctatgaacaagttgtctaacgtaacactctctgctgaacaagaaaagttgagagagcgcgttttgtcgttcatgcgttccaacttatctcagtacaagtctgactggaaacatccggccatgtttgtaatccaaggggacgcaggtacaggcaagtctgtgattctaaactccttgttcaatgaaattcagaaactatcccagttctcaccttcttctgaagatatcttacatgggacacataattatctggtagtcaaccatcccgagatgttaaagttatatatccggattagtgacagtttcaaatatatttctaaatcgtcactagaacggcccacttcgttgatcaacaatctacagaagagaaaagtcatggccgatgtagtcattgtagatgaagcacatttgttggccacttctaaggatgctttcaaaagattttatggcgaaaaccatctcaaagacttaatgtccctttgtaaagtgcttgtattggtttacgatgataagcaagctttaagaatgggttcctattgggatgaaggttctaataacggtgccactttaaaggacttttacaacgagattccaccaaaatccagagactggtacactttaaaacagcagtttagggttgctgccccacaaaacgtgttgaactggattgaccaaattagtgtcgcaggtaaaatcccaccaattgaatctgtgctatctaagggcaatgcagattgtgctgacgataaaattaagaattttgatttcaaaatttgggatgattgtggcgccatgtacgaggcaatcaaggagaaagaccgtcaatacggccaatgtaggatgctatctacttacgattttccctatcgcttggacggaaaagactattacgttgaatgtggtgacaatttcaaagttcgctgggatcgctatactccacgtgaagtgacgccttggagtgagcgttgcgacacgattgatgaggtaggtagtgtgtatactatccaagggtttgatctgaattatgctggtgtaattttgggccgttccattgggtatgatgcggctaatgactgcatcaaactaagaccagagctgtatgacgatagggccggtttcaccaaaaagaaaaacattcacaatgcagaggacgttaagcaaaagattattatgaatagcattaatgtcctcttaactcgtggcgtgcgtggtctgtatgtttatgcatacgatcctgaattaagagagagactgcttcgtccatcaaaaaaataggaagtacatagtatagacaaattttataaatattaacttttatttgttgcgatcttca

SEQ ID NO: 3156 - DNA, 1774 bp, Saccharomyces cerevisiae
gtaggtgcaacgcgaaattgtctctgtctacttgtgccttgaacatcgaacttacaacagattaacaaagtatcgttgctcttttcattcgtctgttcgttatcatcattggatagggcttactttctcgcacgtgatttttcccacagtataaattttgagctataagtggtaataaaaattcaataaaaatatagggaaaacaagcccagtagttttgatttcttctatcatgtcagctatacaatcgccagcacctaaacctctgcagccaacttatccagctgcttcgccagcttccacgaatgcatatatgaagccgggcctaattggtagtcctgccgtcagtaatcataccgagcctaacaatggtaacaatgaaactgcggagcctcagggaccaaatcagagaattgatttgggtgccatgatcgaagaattaacctcactattgggaaaagaaagctggacgaaatatgctcagatcatcagtcttttcattttagggaagttatccagaaaggaactttctaatgaattagagctggtattttcaccaagcgctgcaagcttagaaaaatcaaatacaaatcatcaccatagtttagtacgacttcataaccaacttttattagggatttttgctaattcattacgtgaaaaccctcttgggagaaacggtaatgagagttcttggggatttggcaatggaagcaacaatccaaacaataaactaaaaagaatcaataagcataactctcaaattgaagtctataaaaaaattgtcatgtcgttacctctaaatgatcgaaatagacttaaaatgatcacgaaagaggccggcaaaagaggcttcattttttgctctgtatttcaagccagattaaataatatacccaaaattcccattgtaaccaatccagaaagtttgaagcgtgtcaagagcaataatttaaaaacgccgctggaatggtcacaagatataatgaatggattcaacgttcctttagcgagcgaaagccattctttaccagacacggattcgttttacttaagaatggttggtatagcaagagaacatgggttagtcggcacagtggacgcacgttgcgtagagcttatatcattggccctagatcaatatctaaaaaatataatagagtttactattgatacagttcgttatagaaggaagaaatattcagattattatgatttgaatgagagtgggctttataaatccgtatcagaaatggctgctgataaacgcgatgccaaaattaagcagttagatgatgataaaaatgaggatgaatgtgccgatgaagccaaaagtattaataacggcaataacagtagcaaggacgatattggcgacatatcaatgagcagcattacaaaggctggcgaagcagttaatgaggagttacatgaaaacagaacgatatcattaacgaatgaagacatatatgattcgttatctatatttccgaatttggttgaaccttcaggttcatactatgcgttaactaatttagggctagttaacgatgatgaactagtagatatgaagagcaatattgacgacttgccggacttcttaaatgaaaagccgactttcacgcctttggatgaaagaaacgttggtacaaggcatgaattaaattggttaattaaaggaatcttaacggaagattgatgtataaaaagtgtgtgtatgcggtatgttgtaattatattgaaagattataaaccttatttgtttcatatctaa

SEQ ID NO: 3157 - DNA, 1833 bp, Saccharomyces cerevisiae
atgtttgcatccgctggacaacaacaccctcaaattgttcctaaggaagaggaatccatattaaactacctccttgaagtgagatcctccttggctaaactcaagcaaaataggacccagtatttgaactctaaggatgtccaaactacttaccaacacgtcttgaccaaagtcagagagttggacgatattaggaagaatagtcatgagacgcccgctaagagcgccgccaccctgattcatagtactgaattgcataatagagttgactccgtactggatgatgtctttcaattgctctcgttgtgttttttaactgttgggctaaaaaattctgcacctgcgacttatgcatcgttatctactgtggagagtcttttggaacatttaaatgaatcaaacgtcttcacccatcacgatttgagtcctattaaggaaaggctggaagaaatcagcaagattgtcgaacaaaaaaactctagtcctgcgtacgatgaggatggaaatgatgaccgattaagggaaatcgacaacgaaaggaaaaagaataaaattgaggaagacctattactacgtgctaaattaaagcattgcaaggacgaatatgatatattggaaggcaaattggaggaaattgatccgtctttgtctactgtaatggaaaagttattccgaattagaagaggtttattgtcattagttgcatctgctaaaaaaacaatgtctaaatctgatattaataccaactctttattgcaggaacaaaatgatttgcaaacgaacaatgaaagcttaacggatgacaaacatttagtatctcaagagtatgtccatgagaaattatcagttttgaagaacgaattaagtgaattagaatctaatcgtgacgattctggtaaattcaagtccttggagtctcatcaggtggcagaaaaaggccaaagtgtccttaatggtttattggatgattgccatgatttagttaacgatttatcacaccaaaaaaatggcgggttgactttagatccatatttacagccaatatatgaacagctgattgatataaagactaccttagaaaatttaatgatcacaagaagatggactttgagagaaaccgatttattttcttaccaaaaaaaattgaacgaaattgataacaaaagaatcaatggtaagtttccaacaaaatctcaggactcaaaggggcaatcaatacttttatacctgttgcgtagatgttatgccataatttataaactgttggaaagttcagagcccgtatctgaagcgttgcagccaattcacaatcaactatctacagttcgtcgttgcctattagaattgaaaagaatgggaggtgtgaataatgaaagagagttatacccttatcaaatgaaattggcttcattggacaacctgagaactgaaggtatattctatgactctgatggcaatatacctgaaggccaaggtatattgaatgctttattagcagaatgttttgatatcttgcatgaattaaaagtggaagccgaggaaaaagcacagaactctacttcaagtgatggttctgacgacgatgacaacggagaatcaggcatagactcgaactcaaacgacagcgagcctgaatctgaatatcaacaggaatagaggagagtgtttctttatcttccatttctccctattttcttggtagaggaaaacattataaacaataaaatgaaatacagaaagaaaaaaagttattctcttatgtctatgtatataacaaaccctgaatgagcatctatataaaaacaaaaatatataaacaactttatgtcatta

SEQ ID NO: 3158 - DNA, 1556 bp, Saccharomyces cerevisiae
aaattccataaagtctaactattaaacggataagagatacaatcatgttgagatttaccaattgtagttgcaagactttcgtaaaatcgtcatataagcttaatataagaagaatgaactcctcgttcagaactgaaaccgatgcatttggtgagatacacgtgcctgctgataagtactggggtgcccaaactcaaagatcctttcaaaacttcaagattggtggcgctcgtgaaagaatgccattgcctttggtgcatgcatttggtgttttgaagaaatctgccgcgattgtgaatgagtctctggggggattggatcccaagatctccaaggctattcaacaggccgctgacgaagtggcttctggtaagctagacgaccactttccattggttgttttccaaacgggttccggtacccagtctaacatgaatgctaatgaagttatttccaatcgtgccattgagatcctaggaggcaagattggatctaaacaagtccatccaaacaatcattgcaaccaatctcaatcatccaatgatactttccccactgtcatgcatatcgctgccagtttgcaaattcaaaacgagttgatacctgagttgaccaatttaaagaacgcccttgaagccaaatccaaggaatttgaccatattgtgaagatcggtagaacacacttgcaagatgccacgcctttgacactaggtcaagagttttccggttacgtgcaacaagttgagaacggtatccaaagagtggcacattctttgaaaacattgagtttcctggcacaaggtggtactgccgttggtacagggttgaacaccaagcccggattcgatgtcaagatagccgagcaaatttccaaagaaactggactaaagtttcaaaccgcccctaataagttcgaggctttggctgctcacgacgccattgtcgaatgtagcggtgctctaaacacccttgcttgttctcttttcaaaatagcgcaagatataagatacttagggtccgggccacgttgcggctaccatgaactaatgctgccagagaatgaaccaggttcctcaatcatgcctggtaaagttaacccaacccaaaacgaggcattgactcaagtgtgtgtgcaagtcatgggtaacaatgcagctatcacgtttgccggctctcaaggtcaattcgagttaaatgtcttcaagccagtcatgatcgccaatctattgaattcgatcaggttaattactgatgccgcatattcatttagagtgcactgtgttgaaggtatcaaagccaatgagcctcgtattcatgagttgttgactaaatctttaatgttagtcaccgctttgaaccctaagatcggttatgatgccgcttccaaggtcgccaagaatgctcataagaagggcattaccttgaaggaaagtgcattggaattgggtgtattgactgaaaaggaatttgatgaatgggttgttcctgaacacatgctaggtcctaaataaacgagctaaatacctaataatatacaagttttttatgtcttatta

SEQ ID NO: 3159 - DNA, 2203 bp, Saccharomyces cerevisiae
ctaacgttcttttatagagccaaacataattcttttgcactttcaatataaggtacaagtgaaacacaggaaaaaaagaactaactctaagtaatgaagatgcctctaaagaagatgtttaccagcacgtctcctcgtaactcttcttctcttgacagtgatcatgacgcttactattcgaaacaaaatcctgacaatttccctgtaaaggagcaagaaatctataacattgacctggaagaaaacaatgtgtcctctcgttcatccacctctacatcaccttcagcaagggacgactctttcgcagttccagatggtaaagacgaaaacacgcggttgaggaaagatttaaaggcaagacatatttctatgatcgccattggtggttcattaggtacaggtctgcttataggtacaggtaccgccttattgacgggtggtccggttgcgatgttaattgcatatgcctttgtcggccttttagtcttttacaccatggcctgtcttggtgaaatggcttcttacattccattggatggttttacaagttatgcctcacgttacgtggatcctgcattaggttttgctattggttatacttaccttttcaaatatttcatcttacctcccaaccaacttactgctgctgctttggtcattcaatattggatcagcagagaccgtgttaaccctggtgtgtggattactatattcttggttgttattgtcgctatcaatgtcgtcggtgtaaaattctttggtgaatttgaattttggttgtccagtttcaaagtcatggtaatgttgggtctaatcctgttactatttattattatgcttggtggaggtcctaaccatgaccgcctagggtttagatactggcgtgatcctggtgcgttcaaagaatattcgacggctatcactggtggtaaaggtaaatttgtttcgttcgttgctgttttcgtttacagtcttttcagttacacgggtattgaattgacaggtatcgtttgttctgaagctgagaatccaagaaaaagtgttccaaaggcaattaaattgacagtttaccgtatcattgttttttacctatgcaccgttttccttttgggtatgtgcgttgcatacaatgaccctcgtttactttccacaaaaggtaagagtatgtctgctgcggcatctccattcgtggttgccattcaaaactcaggtattgaagtcttacctcatatcttcaatgcttgtgtcttggttttcgttttcagtgcttgtaactcagatttgtacgtttcttccagaaatttatatgcgttggcaattgatggtaaagcgccaaagatcttcgctaagacaagtagatggggtgttccttacaatgctttaatactctccgtgctgttttgtggcttggcgtacatgaatgtgtcttcaggatcagcaaagattttcaactactttgttaacgttgtttctatgttcggaatcttgagttggatcaccattttaattgtttacatctacttcgataaagcctgccgtgctcaagggattgacaaatcaaaatttgcttatgtcgctcctggccaacgttatggtgcttattttgctttattcttctgcattttgattgctttaatcaaaaacttcactgttttcctaggtcataaatttgattataaaacattcatcaccgggtatattggcctgcctgtctatatcatttcttgggctggttacaaattgatatacaaaaccaaagtgataaagtctaccgacgtggatttgtacacatttaaggaaatatacgatagagaagaagaagagggaagaatgaaggaccaagaaaaggaagagcgtttaaaaagtaacggtaaaaatatggagtggttctatgaaaaatttttgggtaatatcttctagatgcctttttaatcaaagccttagggcaacatgaaactatattcatccaatcaaaaaaatgagcacaagaatttctctttgatcatttttcttttacctttaataacaatcgttatcaacattttttatttccagtcctaccacagcattattgcataattaatttacaggaagattttcttgaaaaaatagaaagaaaaatacccattttttcaaggaaaataaaatttatatattacatacatttctataaaacagtttaaattcaaaaatataaacaaaa

SEQ ID NO: 3160 - DNA, 1074 bp, Saccharomyces cerevisiae
ctttagacgtcgtaccttttatatcgatacaaataaaaataaaattataccatgggaaaggctgcgaaaaagaagtactccggagcaacttcgtccaaacaagtctctgccgagaaacatttgagttcagtatttaaattcaacacagatctaggtcagcatattttgaaaaatcctttggtggcgcaaggtattgttgataaggcacagattagaccctcagatgttgttttggaggttggtcctggtacaggtaacctaactgtaaggatcctcgaacaagcaaaaaacgtagtggcagtagaaatggatcccagaatggctgcagaattaactaagagggtacgtggcacacctgtggagaaaaagttagaaatcatgcttggagattttatgaagactgaattaccatactttgatatctgtattagtaacactccttaccagatctcatcgcctctggttttcaaattaattaaccaaccaagaccaccaagagtatctattcttatgtttcaaagagagtttgctttaagattactggcaagaccaggtgactcattatactgtagattatccgccaatgtacaaatgtgggctaatgttacacacatcatgaaagtgggtaagaataacttcagaccgccaccacaagtggaatccagcgttgttagactagagattaaaaatccaagaccgcaagtggattacaacgaatgggatggtttgttgagaatcgtctttgtgaggaaaaacagaacgatttcagctggcttcaaatcgaccaccgtgatggacattctggagaagaattataagacatttttggcgatgaacaacgaaatggtggatgatacaaagggttctatgcacgatgtcgtcaaggaaaagattgacacagttctgaaggagaccgacttaggcgacaaaagagcgggtaaatgtgatcaaaatgatttcctaaggctattatatgcttttcaccaggttggtatccatttttcatgagctctcttatcaattatgtaagtgcttgtatactatttacctaagataagaaaaaaaaaagcaatt

SEQ ID NO: 3161 - DNA, 2412 bp, Saccharomyces cerevisiae
atgttgaatggtcgtttaccacttttgcggctgggcatatgcagaaacatgctgtcccgtccccgactggctaaactgccatctataaggtttcggtctttggtcaccccttcttcatcgcagctcattcctctcagtcggttgtgtttaaggtcacctgcagttggaaaatcactaattttacaaagttttagatgtaattcatccaaaacagttccagaaacttctctgccttcagcctctcccatatctaaaggatcagcaaggtcggcacatgcaaaggagcaatctaaaactgatgactataaagatataataaggttatttatgttggcgaaacgggattggaaactgcttcttacagccatacttcttttaaccatatcatgttccataggcatgtctattcctaaagtcataggtattgtccttgacacacttaagacgtcatctggatcagatttttttgatttgaagataccgattttttctttgcctttatatgagtttctttccttttttactgttgctttactgattggttgtgctgctaattttggtagatttatattattgaggatactaagtgagcgtgttgttgcacgcctaagggcaaatgtcattaaaaaaacgcttcatcaagacgcagaattcttcgacaaccataaagttggggatttaatttctcgtttaggatctgatgcttatgttgtttcaagatcaatgacccagaaggtctcggatggggtcaaagccctaatttgtggggttgttggcgtggggatgatgtgttctttgtcacctcaactatcaatattgttactattcttcactccacctgttctttttagtgcctcagtgttcgggaagcaaattagaaacacctctaaagaccttcaagaagctactggtcaattgactagagtcgctgaagaacaactctctggtatcaagacggttcagtcgtttgttgctgaaggtaatgaattgtctaggtataacgttgcaattagagatatttttcaggtgggaaaaactgcggcatttacaaacgcaaagttttttactacaactagtctcttaggtgacctaagttttttaaccgtccttgcgtatggctcctatcttgttttacaatcacagctctccattggtgatctgactgcatttatgctgtacacagaatatacggggaatgcggtattcggcctttctaccttctattcggaaattatgcagggtgctggggccgcttccaggttgtttgaattaacagataggaaaccttccatttcaccgactgtgggacacaagtataaaccagatcgtggtgttatcgaatttaaagatgtttcatttagctaccctacaaggccttctgttcaaatattcaagaatttaaattttaaaattgcgccaggatcgagtgtttgtattgtgggcccttcaggtcgtggtaaatctacaattgcactcttactgctaagatattataatcccactactgggactattacgatagataaccaagatatctctaaattgaattgtaaatccctaagaaggcatattggtatcgttcagcaagagccggtactgatgtcaggtactattagggataatatcacttatgggttgacatataccccaacaaaggaagaaatcaggtcagtagcaaagcagtgcttttgccataactttatcacaaaatttccgaacacatacgatacggtaattggtcctcacggcaccttactaagtggaggacaaaagcagcgtattgcgattgcaagggctctaatcaaaaagccaactattttgattcttgatgaagctacatcagctttagatgttgaaagtgaaggagccattaactatacgtttggtcaactaatgaaatcaaaatcgatgactattgttagcatcgcgcacaggctaagtacgatcagaagatcagagaatgttattgtccttggccatgatggatcagtggtagaaatgggcaaattcaaagaattgtatgcgaatccaacaagtgctttatcgcaattacttaatgagaaagcggctcctgggccatctgaccaacaactgcaaatagagaaggtcatcgaaaaggaagatttgaatgagagtaaggagcatgatgaccagaaaaaggacgataatgacgataatgataataatcatgataacgacagcaataaccagtctccagagacgaaagacaataattcagatgatattgaaaaatctgtcgaacatctcctgaaagacgcggcaaaggaggctaatccaattaagatcacaccacaaccgtgagtcatccgcatcgcatatacccattcttatctcgcacatttaaatatatactatatataatactgttaaatgccaaataaaaaggatttt

SEQ ID NO: 3162 - DNA, 341 bp, Saccharomyces cerevisiae
tcagcccacaaccgattcataaaatgtctgcctggaggaaagctggtatatcatatgctgcatatttgaatgtggccgctcaggctatccgttcttcattgaaaactgaattacaaaccgctagtgttcttaacagatcgcaaacagatgctttttatacccaatataaaaatggcactgcagcttctgaacccactccaataacaaaatagtttaacgcttcctgggaactgcagctctttttttactcgctgatatacattttaaatattctagcaactgtgtatgaaaacttacgtacttttatacgggaaactaataatgactacaatgatattgaa

SEQ ID NO: 3163 - DNA, 1189 bp, Saccharomyces cerevisiae
taacttgaatattattgaaagcttagttcaaccaagctgaaaagaaccattattcaacataattggaaatcatttcgttactaaatcgtccgaaaattgcagaaaaatggcacgtcttcctctaaagcagttcttagcggataaccccaaaaaagttcttgttcttgacggtggtcaaggaacagaactggaaaacagaggtatcaaagttgcaaatcccgtgtggtctactattccatttattagcgaatcattttggtctgatgagtcatctgctaacagaaaaattgtcaaagaaatgttcaacgatttcttgaatgctggcgcagaaatattgatgactacaacataccaaacgagttataaatcagtttctgaaaacaccccaatcagaactttatccgagtacaataaccttttaaacaggattgtcgatttttctcgtaattgtattggcgaagacaaatatttgattggctgtattggcccatggggtgctcatatttgtcgtgagtttacaggcgactatggtgctgagccagaaaatattgatttctaccaatacttcaagcctcagttggagaatttcaataaaaatgacaaattggatttgattgggtttgaaaccattcctaacatccatgaactgaaagctatcttatcttgggatgagagtatcctgtctagacccttctatatcgggttgtctgtgcatgagcacggtgtcttgagagacggcactaccatggaagaaatcgcacaagttattaaggacttgggcgacaaaataaatcctaacttctcgttcttaggaatcaactgcgtcagcttcaaccaatcacccgacattcttgagtctctacatcaagcactaccaaatatggccttgcttgcttatccaaacagtggtgaagtttatgatactgaaaagaagatatggttgccaaatagcgataagctgaacagttgggatacggttgttaaacagtacattagcagcggtgcccgtatcattggtggttgttgcagaacaagtccaaaagacatccaagagatttctgcagccgtcaagaaatacacgtaaatgcgtttttaaagaagttaaataattcttaacattatatatatgctaaaagcagcatgttacactaaatacattttataaacaatagaaagtatgttaatacaa

SEQ ID NO: 3164 - DNA, 1871 bp, Saccharomyces cerevisiae
ctgaaaaccaattattttgaaagctaacatttcaaaaggctatttcttctgaaatatcaagatggatatactcaagaggggaaatgaatcggacaagtttacgaaaatagagacagaatctactacgataccaaatgactcggatagatctggttcactgatcagaagaatgaaggattccttcaagcaaagtaacctgcatgtcattccagaagaccttgaaaacagcgaacagacagagcaggaaaaaatccaatggaaactagcttctcagccctatcaaaaagtcttgagccaaaggcacttgaccatgattgccataggtggtactttggggacgggactgttcattggtttaggttattctttggcatctgggccagccgctttgctaatcggttttttgttagttggtacttcaatgttctgtgtcgttcagagtgccgcagagctttcctgccaattcccggtttctggctcatatgccacacatgtcagtaggttcatagatgaatcggttggctttactgtggctacaaactatgctttggcttggctgatttcttttccaagcgaattaattggttgtgcacttactatttcatactggaaccaaacggttaatccggctgtttgggtggccattttttatgttttcattatggtactgaacttgtttggtgtgagaggctttgccgagactgagtttgctctgtcaatcattaaggttattgctatatttattttcatcattattggtatcgtccttattgccggaggggggcctaactctactggttatattggcgccaaatactggcacgacccaggtgccttcgcaaaacctgtcttcaagaatttgtgtaacacattcgtttctgctgctttttcctttggtggtagtgagttagtgctgttaactagtacagaatctaaaaatatttcagctatatcacgtgctgccaaaggtacgttctggagaatcgcgattttttacattactaccgttgtcattattggatgtctcgtaccttataacgaccccagactgctcagtggttcgaacagtgaggatgtatctgcctctccctttgttattgctttgagtaatacaggatcaatgggtgcaaaagtttccaactttatgaatgtcgttatccttgttgcggttgtgtcagtttgcaattcttgcgtttatgcttcttcaagactaattcaagctttaggtgcatctggccaacttccttcggtatgttcctacatggacagaaagggtaggcctttggttggcattgggattagtggtgcatttggtcttttaggttttcttgtggcctcgaaaaaggaggacgaggtcttcacttggcttttcgccctttgttccatttcatcattcttcacctggttctgtatttgtatgtcacaaattagatttaggatggctttgaaagctcaaggaagatccaatgacgaaatagcttacaaatccatactgggtgtttatggtggaattttggggtgtgtgctaaatgcattgctaattgcgggtgaaatatacgtatcggccgccccggtcggtagccctagctccgctgaagccttctttgaatactgtttaagtattccaatcatgattgttgtttattttgcacataggttttatcgaagagattggaaacacttctacatcaagaggagtgagatcgatctggatactgggtgttccgtggagaatctagagcttttcaaagcacaaaaagaagctgaggaacaactcattgcttctaagccattctattacaaaatctacagattttggtgttagatggtactcttgcatatgtaacctttaataaattttgcaaatcgaa

SEQ ID NO: 3165 - DNA, 979 bp, Saccharomyces cerevisiae
atatagaccataagaaagaaaacgcacttggataatttttaacaaagaagagggcaaactgacgctcaccaagctattggtttgtttggatcaatcgtcagatatgaagccgaacaatcgaacttgtgatgtaattaccaacaaagatgaatctcttcctgcacttttgctgcctgcactgaacagttacacctgtgacgattcattgctaaaaggacaaatttcaagcaatggcagatatcaaccattcgggttttctgattgctctttactgccaaagcgtttaaacattcaggcagggcaaggatctatgccagtttcttcgattcaatgtgcagaccacagttatagtaattggcaaaaagaatccgaaaagactaagcttcccaagcttggttgcccaacagagtacactgaatactataaaactgtttcttccggcgaaacaaccgattcagcggttgtttcatctatagcaacgaacagactcaaaagaaaacgtcagagggacggcccaagttgtgactcttgtaggataaagaaaataaaatgcaatgcaacaatcattatctttttacaggataggaacctaatttcatcaatttcttcaaatttgcattatacactttcccaagacgacataaaccagtttcgaatgaagtttttcaggaaactgcctgacgtgatgggcacatatgaagtcataaaacaccttgataaaatagtccttttcaaagcctgcacctcttgcagtagaagaaaccaaaaaaatggaaagtgtcttttttcgagaggatttacaaaatctgatatgaacgtatttcccaagataaatagtaaacttaaagacaaaagtatcttcgagatgactgtcgatgattatgttgccgctggcttccaaaccctttaggtttcatgcatgtaatttcctcctatgtaaaatataggaatattaataaaacgcaccaataataagtta

SEQ ID NO: 3166 - DNA, 3028 bp, Saccharomyces cerevisiae
gcattggcactgtttatttctttaagaacatcttcaatactaaataagacaacccatcttcagttatttttactcttggtagagcccaacttaggatccttttgaacctcaagaacttaaaatgtctcaacagtctagctctccaacaaaagaggataataactccagctcccccgttgtgcctaatcctgattctgttccaccacagctttcttccccagctctattttatagctcctcttcatcacaaggtgatatctatggtcgcaacaatagccagaacttaagtcagggagagggaaacatcagagctgctataggttcttctccactaaattttccatcttcttcccaaagacaaaattccgatgttttccaatctcaaggcagacagggcagaattcgttcttctgcgagcgcttctggaaggtctagatatcattctgatctgagaagtgatagagcactgcctacttcttcctcttctttaggccgtaatggtcaaaaccgtgtacacatgcgaagaaatgatattcatacatctgatttatcctctccaagaagaattgtggattttgatactagatccggcgtgaatactttggatacttcttcttcttctgctcctccatcggaagccagtgaacccttgagaataatttggggtaccaacgtcagtatccaggaatgtacaactaattttcgtaattttttgatgtctttcaagtataaattccgtaaaatattggatgaaagggaggaattcattaacaatactaccgacgaagaactatactatatcaagcagcttaatgaaatgagagaacttggtacctctaatttaaacttggatgctagaaacttacttgcttacaagcaaacagaagacttataccatcaactattaaattatcctcaagaagtgatttctatcatggatcaaactatcaaggactgtatggtttccttaatagtagacaacaatttggattacgatttagatgaaatagagaccaagttttataaagtaaggccttacaatgtaggttcttgtaaaggtatgcgcgaattgaatccaaatgatattgataaattgataaacttaaagggtcttgtcctgagatcaactccggttatccctgatatgaaggtagcgtttttcaaatgcaacgtctgcgatcatacaatggcagtggaaattgatagaggagttatacaagagcccgctaggtgtgaacgtattgattgtaatgaacccaattccatgtcactgattcacaacaggtgttcattcgcagataaacaagtcattaagttacaggaaactccagactttgtgcctgatggacaaacgcctcactctatctcattatgtgtttacgatgaattagtggattcttgcagggcgggcgatcgtattgaggtgactggcacgttcaggtccatccccattagagctaattccaggcaacgcgtactaaagtcgttgtataaaacatacgtcgatgtggtccacgttaaaaaagtttcagataagaggttagacgtcgatacttctactattgaacaagaattaatgcagaacaaggtagatcataacgaggtcgaagaagtaagacaaattactgatcaggatttagcaaaaattcgcgaggttgcggcaagagaagatttatacagtttattagcccgctctattgccccaagtatttacgagctagaagatgtcaagaagggtatattacttcagctatttggcggcacgaataaaacctttaccaagggtggccgttatagaggtgacataaatattttactttgtggggatccttctacttccaaatcgcaaattttgcaatacgttcacaaaattactcctcgtggtgtgtatacttcgggtaaaggttcatctgccgttggtttaactgcttatattacaagggatgtcgacacaaaacaacttgttttggaaagtggtgcattagtattgtctgatggaggtgtttgttgtattgacgagtttgataaaatgagtgattctacaaggtccgtcttgcacgaagtcatggaacagcagactatttcaatcgcaaaagcgggaattatcacaacacttaatgccagaagttctattttggccagtgctaacccaattggttcacgctacaaccccaatttgcctgtgactgaaaatattgatctaccgcccccactactttcgagattcgatctggtctatcttgtccttgataaggttgatgagaaaaatgacagagaactagccaaacacttaacaaatctttacctggaagataagcccgaacatatttctcaagacgacgtgctaccagttgaatttttaacgatgtatattagttatgcaaaggagcacatacacccaataatcaccgaggccgctaagactgagcttgttcgtgcttatgtaggaatgagaaagatgggtgacgattcgagatccgatgagaagagaatcacagctaccacaagacaacttgaaagtatgattcgtttggctgaggcgcacgccaaaatgaaattgaaaaacgtcgtagagctggaggatgttcaagaagccgttagattaattagatcagccataaaagattatgcaacagaccctaaaaccggtaaaatcgacatgaatttagttcaaacaggtaaatcagttattcagagaaaactacaggaggatttgtcaagggaaattatgaatgttttgaaggatcaggcatcagactcaatgtcattcaatgagcttataaaacaaatcaatgaacactctcaagatagagttgagtcttctgatatccaggaagccttgtcaagattgcaacaagaggacaaggtcattgtccttggcgagggtgtaaggagatcagttcgcctgaataaccgtgtctgatgctgtctactacaatcattccctgcgtaacaattaataaatactaattaattatagcaagtttgtattttttacatccttatgctttgtaacactattcaatac

SEQ ID NO: 3167 - DNA, 494 bp, Saccharomyces cerevisiae
gataaatcatatttcagaacgctaatcaattcatcatgctaagcaggatccaaaattataccagtgggttggtttctaaagcaaatcttttgtcatcaaaggctttatactatggtaaagtcggtgccgagatttcaaaacagatttatttaaaagagggtcttcaaccaccaactgttgcccagttcaaatcagtgtattcgaacctttataagcagagcctaaactttgctctaaagcctacagaagttttatcgtgtttaaaaaacatccaaaagaatgaactattaaaatatggcgcatatggtattcagttgatagggttttattctgtcggtgaaataattggaagaagaaaattagtgggatataaacatcactaagctttttaattctatctattcgcaaaacccttgtatattcgttaattaaattaaatcaatgtacaaatagaacaaaactagaaaaaagaatatatattcatctcaattcta

SEQ ID NO: 3168 - DNA, 2867 bp, Saccharomyces cerevisiae
gcgtttttgataagtaaaaagcaagcacagcttaaaggataaacaggattttattgaagcaatttttaattataatacattgtggatagaacgaaaacagagacgtgatagatgaacgtttcaaaaatacttgtgtcgcccacggtcacgacaaatgttttacgcatatttgctcccaggctacctcaaatcggtgcttctttgttagttcaaaaaaaatgggccttaagatcaaagaagttctaccgtttttattctgaaaagaatagcggtgaaatgcctcctaagaaggaagctgatagctctggaaaggcatccaataaatccacgatatcttcaatcgacaattcgcaaccaccacctccatcgaacactaatgataaaaccaaacaagcgaacgtagctgtgtcacatgctatgctagcaactagagaacaagaggccaataaagacttaacgagtcctgatgcacaagcagccttttacaaacttctcttacaatcaaactacccgcaatacgtggtctctaggtttgagacccccggtattgcgtcatcgcctgaatgcatggaactgtacatggaggccctgcagaggataggcagacactcggaggctgatgccgttagacaaaacctactgacagccagctctgctggcgcagttaacccatcattggcgtcatcttcatcaaaccagtcaggttatcatggtaactttccatcgatgtattctccgctttatggatctcgcaaagagccactacatgttgtcgtatctgaatcaacttttactgttgtatcgagatgggtaaagtggctgcttgttttcggtatcttaacctactctttttctgaaggttttaaatacatcacagaaaatacaacgctactaaagtcgtcagaagtagccgacaaatcagttgatgtagctaagacaaatgttaaatttgatgatgtctgcggttgtgatgaggcccgtgcggaattggaagaaattgttgatttcctgaaagatccaactaagtacgagtccttgggtggtaaactaccaaagggtgtactgttgactggacctcctggtacaggtaaaactttgttggctagggccactgccggagaggctggtgtagattttttctttatgtcaggttctgaatttgatgaagtttacgtcggtgttggtgctaaacgtatccgtgatttgtttgctcaagcgcgttctcgtgcaccagctattatttttattgatgaattagatgccatcggtggtaagcgtaatccaaaggaccaagcttacgccaaacaaacgttgaatcagttattggtcgaattagatggtttctcacaaacaagtggaattattattattggtgccacaaatttccctgaggctttagataaggcgttaactagaccaggtagatttgataaggttgtgaatgtggatttgccagatgttcgtggtcgtgctgatattttaaagcatcacatgaagaagattacattggcagacaatgtggatccaactattattgcgcgtggtacccccggtttatcaggcgctgagctggcaaatttagtcaaccaagcagcagtttacgcgtgtcaaaaaaatgctgtttccgttgatatgtcccacttcgagtgggctaaggataagatattgatgggtgctgagagaaagactatggtcttaacagatgcagccagaaaggccactgctttccacgaggctggacatgccattatggccaaatacaccaatggtgctaccccgctatacaaggccacgatattgcctagaggtagggcattgggtattacttttcaattgccagaaatggataaggtcgacatcaccaaaagggagtgtcaagccagactggacgtgtgcatggggggcaaaattgcagaagaattaatttatggtaaagataacaccacaagtggttgtgggtctgacttgcaaagcgccaccggcacagcaagggctatggttactcaatatggtatgagtgatgatgtaggtcccgttaacttgtcagaaaattgggaatcttggtctaataagattcgcgatattgctgataatgaagtgattgaacttttgaaggactccgaggaaagagcaagaagactattaactaagaaaaatgttgagctacatagacttgcgcaaggtcttattgaatatgaaactctagatgcccacgaaatcgaacaagtttgtaaaggtgaaaaactggacaaactgaaaacttccaccaatacagtcgtagaaggaccagacagtgatgaacgtaaagatataggcgatgataaacccaaaattcctacaatgttaaatgcatgattttattctaagaagttaaacgtatgaaggaacctacctcaagaccgagaatgctttgttcttttctggtcggtttcgcttttgcttcataacaccagcaatgaagcatgatcgcgggaaactttcagaatctacatcttctcctggtcagcttgaaacttcagattattcgtaaggagaaattataatattatttctgtgataagaaaagaggcattaagcttgggtatttgcgacaaaatacttcaggataaccgatgatcgcaagtgggttattaatttctttcatcccttaaccaaccgtcgctttcccccagtgacaagccttaaaaaagtcacaccatggaacggagtatcgttgatgattaaaccaatcattaatctttcataaaagttaagataaaagcacttgttgatatatataggtacatgtgtatcaatacgccatacattgtaaatagaatattcaatggataaacgtgtgtagcaaaaataatcacattgtagcgcta

SEQ ID NO: 3169 - DNA, 739 bp, Saccharomyces cerevisiae
taaaattgcaattggtagtgaaaacaaataaacaaagacataaccgcactccaatcatgtccgaatatgcatctagtattcactctcaaatgaaacaattcgataccaagtactctggtaatagaattttacagcaattagaaaataaaactaatttgcctaaatcttatttagttgctggtttaggtttcgcttatctccttttgatttttattaacgtcggaggtgtaggtgaaattctttccaattttgctgggtttgtgttgccagcatatttatcgttggttgctttgaagacaccaacgtccaccgatgacacacaactcttgacctactggattgtcttttcatttttgagtgtcattgaattctggtccaaggcaattctatatttgattccattctactggtttttgaaaaccgttttcttaatctacattgccttgcctcaaactggtggcgctagaatgatctatcaaaagatcgtagccccattgaccgacagatatatcctaagagatgttagcaagacagaaaaggatgaaattagagcttccgtcaatgaggcttctaaggctacaggtgcttctgttcattaagaggcaactcacctatatcctcaaatcaaactctcgtttttgttctctttgttatctattctattgagagcatataagtacatatgttattagttgttatatatcgctacttaacatataaaatattttggagtcgttta

SEQ ID NO: 3170 - DNA, 1745 bp, Saccharomyces cerevisiae
gaacagagtagtaggctattagcaaaagcgcgagaattactacattataaaggatctgtcaagaatgacattgaataggaagtgcgtagtgatacataacggatcgcacagaacggtggctggatttagtaacgttgaattgccacaatgcattataccctctagctatattaaaagaacagatgaggggggggaagctgagtttatattcggaacctacaatatgatagacgctgcggcagaaaaacgcaatggtgacgaggtgtatacattggtagatagccaagggttaccgtacaattgggacgcattggagatgcagtggagatatctgtacgacacccaattgaaagtttcacccgaggaactgccactggtgattacgatgcctgccaccaatggtaaaccggacatggccatattagagcgctactatgagctggcgttcgacaaattaaatgtaccagtattccagattgtaatcgagccattggcaattgccctatccatgggcaagagttctgcattcgtgattgatatcggcgcgtcaggctgtaacgttactcccatcattgacggtattgtggtgaagaatgctgtagtgagatctaaatttggcggtgatttcttggattttcaagtacacgaaaggttggctccactgattaaagaagagaacgacatggaaaacatggccgacgagcaaaaaaggtccaccgacgtttggtacgaagcaagcacgtggattcagcaattcaagtctactatgttgcaagtaagcgaaaaggacttgtttgagttggaaaggtattacaaagagcaagcagatatatacgctaagcaacaggagcagttaaaacaaatggatcagcaacttcagtacacggcgttaacgggaagccccaacaatccgttggttcaaaagaaaaattttctattcaagccattaaacaagactttaaccttggaccttaaggagtgctaccaattcgcagagtatctcttcaaacctcaactgatatcagacaaattctcaccagaggacggactgggaccgctaatggcaaaatcagtcaagaaggccggcgctagtataaattcaatgaaggccaatacctccaccaacccaaacggattgggtacaagccatataaacaccaatgttggcgataataacagtactgccagcagcagcaacatatcaccagaacaagtatactcgctactgttgacgaacgtcatcatcacaggatctacctctctgatcgaaggtatggagcaacgcataataaaggagctgtcaatcaggttcccgcaatacaaattgacaacttttgccaaccaagtcatgatggaccgtaaaatccagggatggctgggcgcccttacaatggccaatctgccatcatggagcttgggaaaatggtactctaaggaagattacgaaacgctgaaaagagacagaaagcagtcgcaggctacgaacgcaacaaactagtggtaaggcgcaaatatccaaaagggattgtaggcggctagaaggagatgagatctcgacccatttttctcagcgccggtagtagctatcagtaaggagtaagcgggtttccttcaagattcagtccaccccctactttgagtgagggacatataaacaaacgcgataactcgatgaacccattctaatataaaaaaactgtataaatagttatatagagatgaactctaagctagtgaggcccact

SEQ ID NO: 3171 - DNA, 1327 bp, Saccharomyces cerevisiae
cacacaaagataactatagaatcacatacatatttgtgagaaattaacttcatttcatttatagaagaagttcaaccgaaacaaaaattaaacataatataatataatataatcaaaaatggctgaagcaagcatcgaaaagactcaaattttacaaaaatatctagaactggaccaaagaggtagaataattgccgaatacgtttggatcgatggtactggtaacttacgttccaaaggtagaactttgaagaagagaatcacatccattgaccaattgccagaatggaacttcgacggttcttctaccaaccaagcgccaggccacgactctgacatctatttgaaacccgttgcttactacccagatcccttcaggagaggtgacaacattgttgtcttggccgcatgttacaacaatgacggtactccaaacaagttcaaccacagacacgaagctgccaagctatttgctgctcataaggatgaagaaatctggtttggtctagaacaagaatacactctatttgacatgtatgacgatgtttacggatggccaaagggtgggtacccagctccacaaggtccttactactgtggtgttggtgccggtaaggtttatgccagagacatgatcgaagctcactacagagcttgtttgtatgccggattagaaatttctggtattaacgctgaagtcatgccatctcaatgggaattccaagtcggtccatgtaccggtattgacatgggtgaccaattatggatggccagatactttttgcacagagtggcagaagagtttggtatcaagatctcattccatccaaagccattgaagggtgactggaacggtgccggttgtcacgctaacgtttccaccaaggaaatgagacaaccaggtggtacgaaatacatcgaacaagccatcgagaagttatccaagagacacgctgaacacattaagttgtacggtagcgataacgacatgagattaactggtagacatgaaaccgcttccatgactgccttttcttctggtgtcgccaacagaggtagctcaattagaatcccaagatccgtcgccaaggaaggttacggttactttgaagaccgtagaccagcttccaacatcgacccatacttggttacaggtatcatgtgtgaaactgtttgcggtgctattgacaatgctgacatgacgaaggaatttgaaagagaatcttcataagcataatacaatggtgcaaaattttttttaggcaggaactaatctactaataaactaacaataatgcacaggaaatattaatgatttatttattta

SEQ ID NO: 3172 - DNA, 1565 bp, Saccharomyces cerevisiae
caaagacaagagatataaaagtgcactggcgatttcaggaacaatgggcgcaaccaaaattttaatggacagtactcatttcaatgagatccgtagtataatccgttcgaggtcagtggcatgggacgccttagccagatctgaggaattgagcgaaattgatgcgtctactgcaaaagcgttagaatccattctggtgaagaagaacattggtgacggtttatcatcttcgaacaatgcacattccgggttcaaagtgaatggcaagacgttgataccattaattcacttactttccacctcagacaacgaagactgcaaaaaatctgtgcagaacctaatagctgaattgttatcgtctgacaagtatggagacgataccgtgaagtttttccaagaagaccccaagcaattggaacaattatttgatgtgtcactcaagggagacttccagactgtgctaatctctgggttcaacgtggtctcactcttagtgcaaaatgggttgcacaatgtgaaactagtggaaaagctgttgaaaaacaacaacttgatcaatatcttgcaaaacattgagcagatggacacttgttacgtgtgcatcagactattgcaagaactggccgtgataccagagtatcgtgacgtgatatggttgcatgagaagaagttcatgcccaccttattcaagatcctgcaacgtgccacggactctcaattggccacgcggatagttgcaacaaactccaaccacctgggtattcaattgcagtaccactctttactattgatatggttgctgacctttaacccagtttttgcaaacgagctagtccagaaatacttgagtgatttcttggacctcttgaaattggttaagataaccataaaggagaaagtgtccagattgtgcatatccatcatcctgcaatgttgctccacgcgcgtcaagcagcacaagaaggtgattaagcaacttttgttgctcggcaacgcgttgcccaccgtacagagcttgagcgaaagaaagtattccgacgaagaattgcgtcaagacatcagcaacctcaaggaaatcctagaaaacgagtaccaagaattgacctccttcgatgaatacgtcgccgaattggactccaagttgctgtgctggtctccaccacatgtcgacaacggtttctggtccgataacattgacgagttcaagaaggacaactacaagatctttagacaattgatcgaactcttgcaagcaaaggtccgtaacggcgacgtcaacgcgaaacaagaaaagatcattatccaagtcgccttgaacgacatcactcacgtggtcgagcttctaccagagagcatcgacgttctcgacaagactggcggcaaagccgacatcatggagttgctgaaccattcagattctagggtgaaatacgaggccctcaaggccacgcaggcaatcattggatataccttcaaataaagatatagaagaccgtaaagtagtagtgggtttgaagcctaaataagtagttttgtacgtactattattttaagagaagaacatc

SEQ ID NO: 3173 - DNA, 490 bp, Saccharomyces cerevisiae
aactacaaaacagctttactgacaactcacacaaataacacaaaaaacaaaaatttcaacaatggtcgcctttttagaactaacttctgacgtttctcaaccttttgtcatcccatctctttcgccagtctctcagccaagctcaagaaagaactctgacgcaaacgtcgatgacctgaatctggctattgccaatgccgctcttttggatgcctctgcttcaagccgctcacactccagaaaaaactctttgtctctgttgtaagtgttgtacacgagaattagcacactattagcataaaagacacttggcatctttacttacttgggcaagtaagtcacgtacttttttttttttttccggagcattcattgtcattctatctgcactttcccgcacttacattcaataacctcggatcgggtctcttctacgacagaaactttttgatatatacatatttatgtaatataaatactgagaaagtaa

SEQ ID NO: 3174 - DNA, 1470 bp, Saccharomyces cerevisiae
ctcgtgtgttcttcttttttttccaaaaaaaaaaactcctattatttgcataaacacacgttcactggtacaagatgtctattaatatttgtagagataatcatgatccattttaccgttacaaaatgcctcccatccaagccaaggtggaaggtagaggtaacggtatcaagactgccgttttgaacgtcgctgacatctctcacgcgctaaatagacctgctccatatattgtcaagtattttggtttcgaattaggtgctcaaacttccatctctgttgacaaagatcgttatttagttaatggtgttcacgaacctgccaaattgcaagacgtattggatggctttattaacaagtttgttctctgtggaagctgtaaaaatccagaaacggagatcatcattaccaaagataatgatttggttcgagactgtaaagcctgtggtaagagaactccaatggacttgagacataaactatcatccttcattttgaaaaacccacctgactccgtttctggttccaagaagaagaagaaagcagctaccgcttcggccaatgttcgtggtggtgggttgtccattagtgatattgctcaaggtaagtctcagaatgcaccttcagatggcaccggctcatccactccacaacatcatgacgaagacgaagatgaattatctcgtcaaatcaaggcggctgcctctaccttagaagatatcgaggtcaaagatgacgaatgggcggttgatatgtctgaagaagccattagagctcgtgccaaggaactagaagtgaactctgagctcactcaactggatgaatatggtgaatggattttggagcaggctggtgaagataaggagaacttaccatcagatgtggagctttataagaaggctgcagaactagacgtcttgaatgatccaaaaattggttgtgtcttggcgcaatgtctattcgatgaggatatcgtaaacgaaatcgctgaacataatgcatttttcactaaaattttagtcactccagaatacgaaaagaactttatgggtggtattgaaagatttttaggtttagaacataaggatctaatcccactattaccaaaaattttggtacaactatacaataatgatatcatctcggaagaagaaatcatgagatttggtaccaaatcatccaagaaatttgtacctaaggaggtatccaaaaaggttcgtagggctgctaagccattcattacgtggttagaaaccgctgaaagtgacgatgatgaagaagacgacgaatagcttaggagggggcaaaagacttatgtgtaaattattatatgacatggcgtaagataaggattatgttctgttgtttttgagctcgttgatgtatagatatgtaaatatttataaatataatatttcttccaagtgcgacatacttggtactggcaaaaaacaaagatgagacttttaa

SEQ ID NO: 3175 - DNA, 377 bp, Saccharomyces cerevisiae
acaggaagacaactgagacaaaaatggctaaaagaactaagaaggttggtatcactggtaagtacggtgtccgttatggttcctctttgagaagacaagtcaagaagttggaaatccaacaacacgctagatacgattgttctttctgtggtaagaagaccgtcaagagaggtgctgctggtatttggacttgttcctgttgtaagaagaccgtcgctggtggtgcttacactgtctccactgctgctgccgccaccgttagatctaccatcagaagattgagagaaatggttgaagcttgattttattttaattatatgtataaaaatcataaaacaactatataattaattataactcaaaaacttttccagtaa

SEQ ID NO: 3176 - DNA, 1963 bp, Saccharomyces cerevisiae
catctgtgtttccattaatcgctgcatgtcatcgagcaagaaaatcgtcatcctctatggatcggagacaggtaacgcgcatgattttgctacaatcttatcccatcgactacatcgctggcatttctcccatacattttgctccattggtgattatgacccacaggatatcttgaaatgcaggtacctttttattatatgctccacaacaggccaaggtgaattaccaaggaatgtcaatgcattaaaaggtgaaagacccgtcacgttctggtcgtttttaaagagaaagaatcttccgtcgaatttgctcaaccatattcaaactgccatgcttggacttggtgattcatcttatcctaagtttaactacggcattagaaagctacatcagcgcattgtcacacaattgggtgctaatgaattattcgatagattggaggctgacgaccaggctatggctggtagcaataagggtacaggtctcggaattgaatcagtatattttgaatatgaaaagaaagtcctaagctttcttttaagtaagtaccccaacagaaaggtcaatggccaaataattaagagggaagaattggaccctgaggtttacctagagccagcatcctacctacagctttcagacgaacatgccaatgaaaagttcactagcaccaaggttatattcgaaggtgatgaatcgttaaaggttggcagagttaatataaacaaaaggattacatctgaaggtcatttccaagacgtgaggcagttcaagtttagtaatgtggacaagattcaagaaaactatgaacccggtgatacagtaaccatatatccttgcaatacagatgaggatgtttcaagattcctagcaaatcaaagccattggttagaaattgcggacaaaccattgaatttcaccagtggagttcctaatgatcttaaggatggtggattagttcgcccgatgactttaaggaacttgttgaaatatcactgtgatttcatgagcattcctagaacaagttttttcttgaagatttggacctttgcaactgatgtaactaagatggaacgtggccaagaacaactgaatgatcaaagagaaaaattgcgccaatttgctactgatcaagatatgcaggacttatatgactactgtaatagacccagaaggtcaattcttgaagtactggaagattttatctccgtaaagttgccctggaaatatgtgctagattacttgcccatcattaaaccaaggtactactctatatctagcggccctggggatcctaatattgaattaacagttgcgatagtaaaatataaaactatcttaaggaaaattcgaagaggaatttgcactaactacattgcacgattgcaagagggggaacagataaggtataagttacaaaataatcacataatcaaaaaggaatttttgaataaacctatgattcttgtcggaccgggtgtcggtctagcaccattattatcagtggttaaagcggagatatctaaagatatcaaactcctcttcggttgtagatataaagataaagattatatttataaagatatgctggaagattggttccgtaagggcaaaattgccttacattcatccttttccagagatgaggaaaattcaccaggtgttaaatatgtccaagactacttatggagattaggtgaggaaataactaatttggtagttaataaagacgccgtttttttcttatgtggctcatcaggtaaaatgcctatccaagtcagattaacattcattgaaatgttaaaaaaatggggcaattttagtgatgaagaaactgccaaaaaatacctgaaagaaatggaaaaatctgatagatatatccaggaaacttggtagtcgataacaagacttatcgcattataatgttaaatagatacataattaaaatcttgtcatttgtga

SEQ ID NO: 3177 - DNA, 669 bp, Saccharomyces cerevisiae
tactacagaaaaggcgttgggtcaggacatggaaatagtgtacaagccattggacatacgtaacgaagagcagtttgctagtattaaaaaactaatagatgcggatctatcagagccgtactcgatatacgtatataggtatttcttgaaccaatggcccgagttaacgtacattgccgttgacaacaagagtggaacgcctaacatacccattggttgcatagtgtgtaagatggacccgcatagaaacgtgagactgagaggatatataggaatgctagccgtagagtccacataccgcgggcatggcatagcaaagaaactagtggaaattgccatagataaaatgcaaagggaacattgcgatgagatcatgttagaaacagaggtggaaaattcggcggctctaaacttatatgaaggaatgggtttcatcagaatgaaacggatgttccgctactacttgaatgaaggggacgcctttaaactgatattgccgttgactgaaaagagctgcactcggtctacgttcctaatgcatggccggctggccacataaaaggaaaaacactcgatgatgataaaatatatattaataatacaatttttttatttatttatttaatcatatgtatagatatagaaaaagggcagtagagaaaagaggaa

SEQ ID NO: 3178 - DNA, 1199 bp, Saccharomyces cerevisiae
gaaatatacacgatccaataaaatatactgaagcgaagcaatcagaaatggatgcaatatctgatccaacgtttaagcatgctagatcaagaaaacaggttactgaagaatcaccatctttgcttaccgttattatagaaattgcaccaaagttatggacaacttttgatgaggaaggaaatgagaaaggaagtataataaaggttttagaggcattgatagtatttctcaatgctcacttagcgttcaatagcgccaacaaagtagcagtcattgctgcatactctcagggaatcaaatatttatacccagagagcacatctgctctaaaagcctctgaatctgaaaataaaacccgtagtgatcttaagattattaactcagatatgtatagacgttttagaaacgttgatgagacgctagtggaagaaatatataaactatttgagttagaaaagaaacaaatcgaacaaaatagtcaaaggagcacgctagcaggtgccatgtcagctgggctgacttatgtaaacagaatatcaaaagagtcagtaactacctcattaaaatcaaggctacttgttcttacgtgcgggagtggcagtagtaaagatgaaattttccaatacatccctataatgaactgtattttttccgcaacaaaaatgaaatgtcccattgatgtcgtaaagattggtggttctaaggaaagcacgtttttacagcaaacgacggatgccacaaatggcgtttatttacatgttgaatctacagaagggctaattcaatatttagcaactgcaatgtttattgatccgtcgttaagacctataattgttaagccaaaccatggatctgtagattttaggacatcatgctatttaacagggagagttgttgccgttggattcatctgttcagtttgcctatgtgtcttatcaatcataccgcccggaaataaatgtcctgcttgtgattctcaatttgatgagcacgtaattgccaagttgaagaggaaaccagttgttccaaggttgaaagccaaaaagaaggtgacgaaaccatgaacgaaaggaatgaacattatccgtttcaagcaggtaaccttcgtcacaatgcatcgtaataatacataaaaaaaaattagctttaagcacatgtatattggacattccacagaaaaaaaaaagcttttgatgtga

SEQ ID NO: 3179 - DNA, 1069 bp, Saccharomyces cerevisiae
catctatactccaacgcagctctcttgtttaggtttctcgtcaatcaaattcgcatcacgaagaagtatgtctgaagaatttccatctcctcaactaatcgatgatttggaagaacatccacagcatgataatgctcgagtcgtgaaagatttgcttgcaggtacagcgggtggtattgcgcaagtgctagtgggccagccctttgatacgacaaaagttaggttacaaacatcgagcaccccaacaacagccatggaagtcgtcagaaagctgcttgccaatgaagggcctcgcgggttttacaaaggaactctgacgccattaattggtgttggtgcatgtgtttcattacaatttggtgttaatgaagctatgaagagattttttcatcatcgcaatgctgatatgtcatcgactttgtcattgccacagtattacgcatgtggtgtcacaggcggtatagtaaactcattcttggcgtccccaattgagcatgtcaggattcgcttgcaaacacagactggctcaggcaccaacgcagaattcaagggtcctttggaatgcatcaaaaaattaagacataacaaggccttgctacgtggtttaacacctacaatattgagagaaggtcatggatgtggcacatatttcttagtgtatgaagcgttgattgctaaccaaatgaacaaaagacgtggactagagagaaaggacattcctgcatggaaactttgtatttttggagcattgtctggcactgccttatggttgatggtatatccattagatgtcatcaagtctgtcatgcaaacggataatttacaaaagcctaaatttggtaattctatttccagtgtagccaagactttatatgccaatggagggataggcgcttttttcaaagggtttggtcctaccatgctaagagctgctcccgccaatggtgccacttttgctacttttgaattagcgatgaggttattgggttgataattcctatagaatttatgagccatcgtttaagaaaatagtacaatataatgtataacttgaaactctatcttctta

SEQ ID NO: 3180 - DNA, 601 bp, Saccharomyces cerevisiae
agttaaaaatttcatagctaatggtgacagggggaatggcaagcaagtgggatcagaagggtatggacattgcctatgaggaggcggccttaggttacaaagagggtggtgttcctattggcggatgtcttatcaataacaaagacggaagtgttctcggtcgtggtcacaacatgagatttcaaaagggatccgccacactacatggtgagatctccactttggaaaactgtgggagattagagggcaaagtgtacaaagataccactttgtatacgacgctgtctccatgcgacatgtgtacaggtgccatcatcatgtatggtattccacgctgtgttgtcggtgagaacgttaatttcaaaagtaagggcgagaaatatttacaaactagaggtcacgaggttgttgttgttgacgatgagaggtgtaaaaagatcatgaaacaatttatcgatgaaagacctcaggattggtttgaagatattggtgagtagagcacgcagcacgctgtatttacgtatttaattttatatatttgtgcatacactactagggaagacttgaaaaaaacctaggaaatgaaaaaacgacacaggaa

SEQ ID NO: 3181 - DNA, 739 bp, Saccharomyces cerevisiae
tcgagatcctagagagccttgtacatgtgattgcacagtaaagaaggtatgcaggctaaattattgtttaccagactaaactttagacgtccctccacaactttacgccagtttcccctaacatgttttttatttcatagcaaagcattttactcggatctggtcactaaggagccgttgatcacaccgaaaagaataataaataagacgcctgggttaaacttatctatttctgagagggcttccaacagactagctgagatctaccgcaatagtaaggaaaatttaagaattagtgtggaaagtggtggatgtcacggtttccagtacaatctaactctagaacccgctaccaagccagatattaagaatgatgtcaaagacaaggagttttcagacgaccttgacgatgatgattccaaggatataatatacgtgttacccgaagataagggtcgagtgataattgatagtaaatcactaaacattttgaataacactacactgacatacactaatgagttgatcggttcttcgttcaaaatcatcaatggtagcctaaaaagtagttgtggttgtggaagtagttttgatattgaaaattaagctgtattatattcatccctgtatatagcatgcccagctgccaagcatttttttacttaattgtctctattatatatttgaaaacctagcaagagcattacgggataaaacgctgcggcgttcgcattattaa

SEQ ID NO: 3182 - DNA, 988 bp, Saccharomyces cerevisiae
gcaacggaattatgcaaaacggcacagaagacaaaagcaatattcctgctcgtagtaatgatgatgtattgccgccgttagccgtcagacttactatgaaagtaatgcgattaattttcatcggaaaaatgtttgcatattcatttgtaccctttcccccatttaaacttttgacatttgataatactgtgggctggttcgtagcatattcagcgatcgtttctatttgggggtttgctgtgtggatggaaagaggatatagacataagattaatctactgcctccaagatgtacgaagataagatgctctcgctgcaatacaagaataagatcccccaattggttcaaatataagaattggttatattttttcctattatacgtttctctaaccacttctaacttaataattcaactggcctcttttatgacagaaatgagtcgtcggggtataagcgttcctggaacgaaggatccaggcaagagagattatttagggcttatcataccaatgcgattcattggtgcatttatccattacatgacggctaatttattcaaagagtattatttacataacggcccactagaaaagaatgatagaccttctaccgatgagaagacatcagagaatgaaacgctatagcttaacctcgattaaaattaagttcagtatgccataggtgcgtttattacatgttttttaacaacacttcaatatttctttctctgtatttttcaatagggaacaaaatgtactattttctccatgaggcctgaaatagcaaatgtactcccgcagttaataaatgtacggacagcttttcatagccaattaaaagcagtttatatctctttcctagcggatcacatctaatggttgtccaacttcccttggattaagaaataggtgaataacgggatagtttttgaggatccattattgatagaggttataattttagacaggcaaaatattctagcact

SEQ ID NO: 3183 - DNA, 1878 bp, Saccharomyces cerevisiae
ccgcgtcaataaataattaggaactgtaattgaacctctattagtatatttttttattgattgcatgaaacatccgctcattctgtcatgtctcaaagaaagctacaacaggatatcgataagcttttgaagaaggtgaaggaaggtattgaagacttcgatgacatatacgaaaaatttcagtcaacagacccctccaattcttcgcatagagaaaaactggaatctgacttaaaaagagaaatcaagaagctgcaaaaacatagggatcaaataaaaacatggctcagcaaagaagatgtaaaggataagcaaagtgttctgatgactaataggaggttgattgaaaatggcatggaaagatttaagtccgtggagaagctaatgaagacaaaacagttttcaaaggaggctttaacaaatccagatataatcaaagaccctaaagaactcaaaaaaagagatcaggtcttatttattcacgattgtttagatgagctacaaaagcaattggaacagtatgaggctcaagaaaatgaagaacaaacagaaagacacgaatttcacatcgccaacctagagaatatcttgaaaaaacttcagaataatgaaatggacccagagcccgtagaagaattccaagacgatataaagtactatgtagaaaataacgatgatcccgatttcattgaatacgatacaatttatgaggacatgggttgcgaaatacaaccttcatcaagtaataatgaggctccaaaagaaggaaacaatcaaacttctttatctagcattcgctcatcaaaaaaacaagaacgttctccaaagaaaaaagctccgcagagggatgtttctatatcagacagggcgacgactccaatcgcgccaggtgtagaatcagcctcgcaatctatatcttctacgccaacacctgtgtcaactgatacgccattgcatacagtgaaagatgattcaataaaattcgataattctacccttggtacaccaactacacatgtgtctatgaaaaagaaggaatcggaaaacgactcggagcaacaactaaatttcccaccggatagaactgatgaaattcgaaaaaccatccagcacgatgtagagacgaatgcagcttttcaaaatcccttattcaacgacgaattaaaatactggttagactcgaaaaggtacttaatgcaacctcttcaagaaatgtcaccaaagatggtatcgcaattagaatcttcgctattgaattgtccagattctctagatgccgattcgccatgtctatacaccaaaccattatctttgcctcacccaacgtcaatcttttttcccaatgaaccaattcgatttgtttatccgtacgatgtacctttaaatttaacgaataatgaaaatgatactgacaataagttcggtaaagatagtaaagcaaaatctaagaaagatgatgatatctattccagaacctcactagccagaatatttatgaaatttgatcttgatactttatttttcatattctatcattaccaaggatcatatgaacagtttttagctgctagagaactttttaaaaatagaaactggctattcaacaaggtagatcgctgctggtattataaagaaatcgaaaagttaccaccaggaatgggcaaatctgaggaggaatcatggagatactttgattataaaaaaagttggttagcgagacgttgcggtaacgacttcgtatataatgaagaagatttcgaaaaactgtaaacagtttccttttacttatataattctcatcgtgatttactaggtaaatgtagtattcaaaatctccaatttgtactctttaacttcaccttcacatattatcttttt

SEQ ID NO: 3184 - DNA, 1313 bp, Saccharomyces cerevisiae
caggagactcttactaagcatactacttctcaaaaaagggctttattttatagaacataaaacatactgtaggatcgcacactggaaaatatgttgaaacgatcatctctaatatatctatcatgtgtcctaatcattaccataccaatacttttgcatgtatacaatggtccaggactgtcccatgaagccaatgaacatagggcttctcacaagcaaaaaagaacgttagcaaatccggataaacccaaaagcgaaaacgatgaagatctattttgtgcggtaaccaacccagtcaccggatcatacatagatctatcacagctatcttcaactcccaacaaattaagggagggccaaaaacagatttctggcaataacaagcatgaatcctccaagacgaagtggtcagtgagaggttggggctacgatacaaacttcacgttaggcatctgctctagtcctgtcggagaagctgagtcgcaacaactgtccaatctaacgggcgctttttacgtagaccagttgaacgaaaataatttagtatcgattggagacttcagtacaaggcctgcgttagtcggcggctctactgccaagaaattaactctcaaatacgaaaacggctctatgtgcccgaacgggaaggacaagaaggcaactttattgaattttgtctgcgataaagaaattcaatcaaaggcccagatatcatacattggaaacctacacaattgctcgtatttcttcgaagtccgcagcattcatgcgtgccccacctcaaacaaaaagaatgaagttaacgttttgggtatcttcatcggtatcttcgctatattctttttagtcgaatttgcggggagaagatggatctatgctaaactaaataggcatttgaaaaacgacgacgagttacacgacatatcgccatctttaaatgagcaaccacactgggacctcatagaggacgggtctcgctggagtaaatttttcaacgggataattaagacgacaagaaggttcacgaaatctttaatgaggtctttagtcagaggcaggaacagccgtcaagggggcataagactacggtcatccccatctgcctcttcgtccagccttgccaacagggagttcttcagagacatggaggctcaaaacgaaattattgacagcctagacatcaatagtcatacaacagaaagcgaccacccaactttggctgataatagcgtataaacaatgcatactttgtacgttcaaaatacaatgcagtagatatatttatgcatattacatataatacatatcacata

SEQ ID NO: 3185 - DNA, 1533 bp, Saccharomyces cerevisiae
gcatagcaatctaatctaagttttaattacaaaatgggtaaagagaagtctcacattaacgttgtcgttatcggtcatgtcgattctggtaagtctaccactaccggtcatttgatttacaagtgtggtggtattgacaagagaaccatcgaaaagttcgaaaaggaagccgctgaattaggtaagggttctttcaagtacgcttgggttttggacaagttaaaggctgaaagagaaagaggtatcactatcgatattgctttgtggaagttcgaaactccaaagtaccaagttaccgttattgatgctccaggtcacagagatttcatcaagaacatgattactggtacttctcaagctgactgtgctatcttgattattgctggtggtgtcggtgaattcgaagccggtatctctaaggatggtcaaaccagagaacacgctttgttggctttcaccttgggtgttagacaattgattgttgctgtcaacaagatggactccgtcaaatgggacgaatccagattccaagaaattgtcaaggaaacctccaactttatcaagaaggttggttacaacccaaagactgttccattcgtcccaatctctggttggaacggtgacaacatgattgaagctaccaccaacgctccatggtacaagggttgggaaaaggaaaccaaggccggtgtcgtcaagggtaagactttgttggaagccattgacgccattgaacaaccatctagaccaactgacaagccattgagattgccattgcaagatgtttacaagattggtggtattggtactgtgccagtcggtagagttgaaaccggtgtcatcaagccaggtatggttgttacttttgccccagctggtgttaccactgaagtcaagtccgttgaaatgcatcacgaacaattggaacaaggtgttccaggtgacaacgttggtttcaacgtcaagaacgtttccgttaaggaaatcagaagaggtaacgtctgtggtgacgctaagaacgatccaccaaagggttgcgcttctttcaacgctaccgtcattgttttgaaccatccaggtcaaatctctgctggttactctccagttttggattgtcacactgctcacattgcttgtagattcgacgaattgttggaaaagaacgacagaagatctggtaagaagttggaagaccatccaaagttcttgaagtccggtgacgctgctttggtcaagttcgttccatctaagccaatgtgtgttgaagctttcagtgaatacccaccattaggtagattcgctgtcagagacatgagacaaactgtcgctgtcggtgttatcaagtctgttgacaagactgaaaaggccgctaaggttaccaaggctgctcaaaaggctgctaagaaataaggagattgataagacttttctagttgcatatcttttatatttaaatcttatctattagttaattttttgtaatttatccttatatatagtctggttattctaaaatatcatttcagtatctaa

SEQ ID NO: 3186 - DNA, 1102 bp, Saccharomyces cerevisiae
gatccagtgatagagaaggggagaagtagatacgcagaatgatgactagggagagcatagataaaagagcaggaagaaggggtcctaatctgaatattgtgctgacgtgtccggagtgcaaagtctacccaccaaaaatcgttgaaagatttagtgaaggggatgttgtatgtgctctatgtggtctagtactatcagataaactggttgacaccaggtcggagtggagaacgttttcaaatgatgatcacaacggtgatgacccaagtcgtgttggtgaggcttcaaatcctcttttagatgggaataacctatctacaaggatcggaaagggtgaaaccacggatatgagattcaccaaagaactgaataaggcacaaggaaaaaatgtgatggataaaaaggataatgaagtacaagctgcatttgctaagattaccatgctatgtgatgctgctgaattaccgaagattgtgaaagattgtgccaaggaagcatataaactttgccacgatgaaaaaactttgaaggggaaatcaatggagagtataatggctgcatccatactgattggttgcagacgtgctgaagtggcaaggacttttaaagaaatccagtcattaatccatgtcaaaactaaagagtttggtaaaactttaaacataatgaagaacattttaagaggcaagagcgaagatggtttcttgaagattgataccgataatatgagtggtgcacaaaacctaacttatatacccaggttttgttcgcatctgggcttaccgatgcaagtcactacttctgctgaatataccgcaaagaaatgtaaagagatcaaagaaattgcaggtaaatcccctattactatcgctgttgtttccatctatctaaacatcctgctctttcagatccctattaccgcagcgaaagtgggccaaaccttgcaagttactgaaggtaccatcaaatctggttacaagatactttatgagcatagagacaagcttgtggatccgcagcttattgctaatggtgtagtgtctttggataacttaccgggcgttgaaaagaaataatgaagtgataaaacagtaaattatag

SEQ ID NO: 3187 - DNA, 483 bp, Saccharomyces cerevisiae
acagacacgaatatatggagaaatggttgtgaaagctattgcacgaaattccataggtcgtaatggagttggagcattcgtgtttccatgcagaaagattactttgcaattctgtaactggggagggtcttcggaaggcatgaggaaatttttgacttcaaagagattagataaatggggccaggagttcccatggatacagtttgaagtgatgaggaagtctggacatcctttgttgagggcagaatacacaaatgggcgtgaaaaagttatttgtgtgagaaacttgaacattgacaatgtagaaaacaagctaaagctattgaaggattctgatggagacattttacgcagaagaacaaagaatgataacgtggaaagcttgaacagtagtgtgaggggtatatggtcgcctctgcatgctgcgaaaaggcatagaatttagctttagtatataagaaaattctagaaatagagagagat

SEQ ID NO: 3188 - DNA, 1019 bp, Saccharomyces cerevisiae
tcaatatatcaattttcaaaagagaataacaaatttactattaaattgaatagatagaaagaaaccagaaagaaaagaaggaaaaaaaaacaaacatgcaagctattgccgatagtttcagtgtaccaaacagattggttaaggaacttcaatatgacaacgaacaaaacttagagagcgatttcgtaacgggcgcctcccagtttcaacgtttggcaccatcgcttacggttccaccaattgcgtctccacagcagtttttaagagcacacacagatgattcacgaaacccagactgtaaaatcaagatcgcacatggtactacaaccttagcatttagatttcaaggcggtattattgtggcagtagattctcgtgccactgccggcaattgggttgcttctcaaactgtgaagaaagttattgagatcaacccatttttattgggtacaatggctggtggtgcggcagattgtcaattttgggaaacttggctaggttctcagtgtaggctgcacgagctgagggaaaaggaacgtatatctgtcgcagccgcatccaagattttaagcaatttagtataccaatataaaggggccggtttatcaatgggtactatgatctgtggttacactaggaaggagggcccaaccatttattacgtcgactcagacggtacaagattaaaaggtgacatattctgcgttggttcaggtcaaacatttgcatatggtgttctagactctaactataaatgggatttatccgttgaagatgctttatatctaggtaagagatctattttagctgctgcccatagagatgcttactctggtggttctgtaaatttatatcatgttaccgaggatggttggatatatcacggtaatcatgacgtaggtgaactattttggaaggtcaaggaagaggaaggatctttcaacaacgttattggctaaatagaagcatcaaacatatgtatatgcacatctatattaatgatacattattctcttcaa

SEQ ID NO: 3189 - DNA, 1498 bp, Saccharomyces cerevisiae
ttcttgcctttatataacggggatctaacctcatcaacagcaaaaatcgtcttaaaacacatctcaaagactagttctcaaacgtcacgctatgaacagtacacctcctacgtcacccgtcaccagggtttctgatggttcctttccatccataagtaacaatagtaagggttttgcttatcgccaaccgcaaaaacataaaagtaacttcgcatattcacatctggtatctcctgtagaggagccgacagctaaattcagtgaggcattccagacagattattctagtaaggcgcccgttgctacctcggaggcgcacctaaagaacgatttagacgtattgttcactaccccccggttttactctccggagaatttggctttaatgttccgtctttctaatacagtttcttccctagaatttctggatgagtttttgatgggcatattacttgctccagagatggattttttgtcaaatccaagttattctcttccgtctaacaaattagtgggacagggaagttattcatatgtgtaccctatatcatcaagtgcttcatcaagatgtaacaacgattcaggggttgttttaaagtttgccaaatcacagcataaaagcaaggtgattttacaggaagctttgacgctagcatatctccagtacatgagtccttcaaccaatgaaagtcatattattccattctatgggttgacatacataactaaatcccattttagaagactgaggtccaacgaatgtgttcctggccttattcttccgaaatgcgaaatgagtttatatcacttcaatacagcagtgtcacataagctttcgttgataacaaaaagaaaaatatggtggagacttatgaagcaaatgatagacgcattaaaatctttgaaaacaaatggtataattcatggtgatataaaaacagcaaatattttaataacagaaatgcatgttcttaatggaggccattgtaaggattttgacttctaccttgctgactttacgtcggcatttcacattaatcaaacaccaacagatctgaataccacggtagaatactgtgcaccagaactaattgatagctcctccgatcatgttcctacatttgaatcggatttgtatgccgtggggctttgtcttttatcatttatatcgcagcatgagccttacaacgaacttcaggcgttagtgtcgcatggatcctctccaggtattggcagttcatctatacagcagtcccaatggctgataaatgctcttttgaaaaaagatcctataaatctaaacatgttaagaaacgatttattccaggattggaagtcagaactagcattattgtccagaattctggttgatagacttcctctagaaaatctcataactatactcgatagtaactatatatgataatatacatgtctatgaaatcgaaaacccccagccatgcatagatcaaacttcaccgtttataattgcgtttaa

SEQ ID NO: 3190 - DNA, 1418 bp, Saccharomyces cerevisiae
agtaaactgcgctttttaccactgttacaatagttactaatacacgcaaaaattctggataaacacggcaaaatggtagacgtggaagagaaaagtcaagaagttgaatatgttgatccaacggtgaatagggtgcccaattatgaggtatctgaaaaggcgtttcttttgacacaatcaaaggttagtattgaacagcgtaaggaagcggcagagttcgttttagccaaaattaaagaggaagaaatggccccttattataaatatctttgcgaggaataccttgttaataatggccaatctgacttggaacacgatgaaaagtcagattctttaaacgaatggatcaaatttgaccaggagctatacaatgaattgtgcaaaaaaaatgaaagtaagattaaagagttaaatgaaaagatccaaaaattggaagaagatgatgaaggtgaactagaacaagctcaagcctggattaatctgggtgaatattatgcacaaatcggtgacaaagataatgctgaaaagacgctagggaaatcattatcgaaggctatttccacaggcgccaaaattgatgttatgctaacaattgcaaggctggggttcttttataacgaccaactttatgttaaggagaagttggaagcagtcaattctatgattgaaaaaggtggtgactgggagagaagaaatagatataaaacatactatggtatccactgcttggccgtaagaaactttaaggaagcggcaaagttattggtcgattctctagcaactttcacctctattgaattaacttcctatgaaagcattgccacatatgcatcggtcacaggtttattcactctggaaagaacagacctaaaatccaaagtcatcgattcacctgaattgttatctttaatctcaacaactgccgcactacaatctatctcgtcgttaacaatttccctttacgcgtccgattatgccagttactttccatatcttttggaaacatatgcaaatgttttgattccatgtaaatatttgaatagacatgcagatttctttgttagagaaatgagaagaaaagtctacgcacaattgttggaatcatataagactttgtcgctgaaatctatggcaagcgcatttggtgtttcggttgcgttcttggataacgacctgggtaagtttattccaaataagcaactaaattgtgtcattgatagagttaatgggatcgtagagaccaacaggccagacaacaaaaatgctcaataccatctgctagttaagcaaggtgacggtttgctaacaaaattacaaaaatacggtgcagcagtgagattgacagggtcagatcgtgtttgaggaatttacattatttagcaacgcacataatcacatcaacatgtatacatagtttg

SEQ ID NO: 3191 - DNA, 1132 bp, Saccharomyces cerevisiae
ctacattatcccgcactcttgacgtatcatcaaataaagctaaactgcggaagcctaaaaatactaagcacgctatttgtcatccattagcaggccaaaagcaaactaatctatgttttcaataaggccaatataataatggataattttgaaagtactgctgaaggaaatttaagtataggaaacaaacgagtatacgaactacgaaaaagaaacttccaaagaaatttggtgaataatttgagctttctcgggtatgttttaatatcattggaatatatcaagtatgatcgtaccgtctggacacttataacaagagcaatagtgcaatctctcataagttctccttttccaagtgatgccaagttacgtaggctagcgaccctcggtgcagataataacacgacgggggttgcaacacttccaggcggaagatctatcaggtttcccggaatgtttggaacagaaatgctttataattcttctagtgaagctgagcaacaagaccatgatgataccgctattgtgtccatgaaaaagcaaatccggaagtttttatttcatggttgcttatcgttgaatatgcttttcattatcttaacaatcctattcccaattgatttttttgaacccctgagtggtagcgagccagtagacgatggccctaagaatactccctcacccttttccaattcagatggtctacttttgggtgagagaagaggtgggctttttctacagatgatcggagaacggctaccaaagagcaacttttccggcaatcttggattagtaatgttcgaatttagcatacttattgtacagtttactttattttcactaacatgtgttgtattggcagatttagattttgaagagccagaaagactagaacctgtaaatagtgatggctacgatggctctgtaatagttgcacgaataccattaaataaaaccatgaatgccattttaaatgacggcaatattaatgacaacaatgagaatgctagcaattctgtctaatagtatatatatgtagtccataaggggtaatgcatattactgttatcggcactattttatagagagttacatttacatatatcattctattacatttccttatctatga

SEQ ID NO: 3192 - DNA, 787 bp, Saccharomyces cerevisiae
ggaaagtgtgatagtacaagatgagttcgaattcaacaccagaaaaggttactgcagaacacgttctgtggtatattcccaataagatcggttatgttcgtgttatcaccgccgccctttcttttttcgttatgaagaatcatcctacggcctttacatggttgtatagtacatcatgtctactggatgcgctagacggaaccatggcaagaaagtacaatcaggtttccagtctgggtgccgttctggacatggttaccgacagatccagtaccgctggcttgatgtgtttcctttgtgtgcagtatccccaatggtgcgttttcttccaattaatgctgggcttggatattactagtcactacatgcatatgtatgccagtttaagtgctggtaagacttctcataaaagtgtgggcgagggtgagtccagattgttacacctgtactacacgagaagagacgtactgttcactatctgtgcgtttaacgaactattttatgctggattgtacttgcagttgttctcaaattctgcaacctttggtaaatggactacaatcataagtttccctggttacgtgttcaagcagaccgcaaacgttgtccagctaaaaagggcagccttgattttagcagacaacgatgccaagaatgccaacgagaagaacaagacttactgataggatgagtttcttactttttttctccttttaattgcgctaatcttttatttatgtgtagtttttatttatgtgaaatggaacattcgttgatttaactttaa

SEQ ID NO: 3193 - DNA, 1099 bp, Saccharomyces cerevisiae
ccccccggaaggaattcaagcacgaaggtgaacattgcctacaagaaaaaatggatgttttattgtcgcttcctcaaccggaattatttaagaccacggtgattccgttcttggcaaatcgcaatataatcaagtcggaagcgattctctccaacttgcactcaattttttatgttgctatattctaccatatttggtttctttttggcaaatggatcttattcccacatttggttaaatggaaattggactatgaccaaaaacataacgtcaagaaagatgagaagacaacttcggaacgtcaagctcaacattacaaaaagaagtacacttctttgatcaatcaaagttcagtccacttaatatccctactgcaaagcatagtggtcctgtactactcattgaagttcttgcttgatccaaaagcctcggccgagccctaccaaacctcacactctcgagtgtttacagaaaatcgagacactcaagtcatctgtatttttgctattggttatttcgtctgggatatctatatttccaccatgtattctactttccccttcgttgtgcacggaataatctccaccgtcgtgttttgcatcggattgaaaccgtacatccaatattacgccccagtgttcttgatgttcgaactttccaatccctccttgaactttagatggttcggtatcaaatttctaccccagaaaagcaaattctgctctctactgctgctgttgaacaatttgacgctcatggtcgtcttctttgccgctagaatcgcctgggggtggtttcaaattggaaaactatgttacgacttttaccaggtgcgcaatgaacctggtttcttagtctttgacaccattgttatccttgcaggcaatttcgtcctggacatcttgaatgttatttggttttctaccatggtgtctgtggctgcaaaggtcttgaagaagggggagtctgtagacaaagtcactaagaatgaacaataatccatggaggcacactttaacatgtgcatatatgtgtatatagactataaacttgtgtaagctatgcgagcattacaaacctagaaaattacaggcaataa

SEQ ID NO: 3194 - DNA, 1350 bp, Saccharomyces cerevisiae
tctacgaccgacaaagtgatctatcaaactgctgacaaaaaatgtcgttggaagccatcgtctttgatagatcggagccagaaaatgtttcggtaaaggtacttgatcaattacttttaccatatactactaaatacgttccaattcacacaattgatgatgggtactcagtcatcaaaagtatgcaggtgagaggtgccccggcaattgcaattgtgggttcgttatctgttttgactgaggtacaattaataaaacacaacccaacttctgatgttgctacgctgtattctttagttaactgggaatctacaaaaacagtgctaaataagaggctagatttccttttgagtagtagacccacagccgttaatttatcaaattctcttgtagagataaagaacatactgaaatcctcaagtgacctaaaggcttttgacggtagtttatataattacgtctgtgaattgatagatgaggatttggcgaataacatgaaaatgggtgataatggagctaagtatttgattgacgtgttacaaaaggacggtttcaaggacgaatttgccgttctgacgatttgtaatactggatccttagcaacctctggatatggcacggctttaggtgttatccgttctttgtggaaggattcacttgctaaaaccgacaaggcagactcgggattggacaatgaaaaatgcccgaggatgggccatgtcttcccactggaaactagaccttataatcaagggtcaaggctaacagcatacgagctagtttatgataagattccatcaactttaattactgatagttccatcgcgtatagaattagaactagtccaattccaatcaaagcagcatttgttggagctgatagaattgttcgtaatggggatacagcaaataaaattggtactttacaacttgctgtaatttgtaagcagttcggaattaagttttttgtagtagctcccaaaacaactatcgataatgtaaccgaaactggcgatgacattattgtggaagaacgtaaccctgaggaattcaaggttgttactggtacagtaattaatcctgaaaatggttccttgatattgaatgagtcaggagagccaatcactggaaaggtcggtattgcccctcttgaaatcaatgtctggaatccagccttcgacattactccacatgagcttattgacggaattatcacagaagaaggtgtatttaccaaaaattccagtggtgaatttcaactggaaagccttttctagatatcattctaattagactctcgaaataattacttttgtactgtaaaggataaaatttcatattgagatgtaa

SEQ ID NO: 3195 - DNA, 1476 bp, Saccharomyces cerevisiae
atgtccaacccaatagaaaacacagaaaactcacagaatactagttcatcaaggtttttgaggaatgtacaaaggttggccttaaacaatgtaacaaatacgacatttcaaaagagtaatgcgaataatccagccctaacaaatttcaaatctacactaaactcagtaaagaaggagggaagtcggattcctcaatttactagagaaagcgtatcaagatcaacagccgcacaagaggagaaaagaaccctgaaagaaaatggtatccaactccccaaaaacaatcttttagatgataaagaaaaccaagacccaagtagtcagcaatttggtgcgctaacttctataaaggaggggagagctgagctgcctgcaaatataagtttacaagaatcctcctcagcgaaggagataatccagcatgatcccctaaaaggcgttggatcaagcactgaggtagtccataactcggtagaaaacgaaaaacttcatccagctagaagtcaacttcaagttagaaataccgaaagtgaaactgatagtggaaaaaaaagaccaatttctacaattgttgaacaagaactgcccaaaaagtttaaagtgtgcgatgaaaatggcaaagaagaatatgaatgggaagacctagatgcagaagatgtaaatgatccattcatggtcagcgagtacgtcaatgatatattcgaatatctccaccaactagaggtcattactcttccaaagaaggaagatctctatcagcatagaaatattcatcaaaatcgagatatcctagttaattggttggttaaaatccataataaattcggcttattaccggagactttgtatcttgccattaacataatggacaggtttttaggtaaagagctagttcaactggataagttacaattggttggcacatcatgccttttcattgcctctaaatatgaagaggtctattctcctagtataaaacatttcgcatcagagacagacggtgcatgtacggaagatgaaatcaaagaaggggagaaattcattttaaagacattgaaatttaacctaaattatcccaatccgatgaattttctgagaagaatttcgaaagcagatgactacgatatacagtctcgaactcttgccaaattcttattagagatatcattggtagatttcagatttattgggatactaccctcattgtgtgcagcagctgcgatgtttatgtcgagaaaaatgttaggtaaaggtaaatgggatggaaatctaatacactatagcggcgggtatactaaagaagaacttgcgcccgtgtgtcacatgataatggattatctagtgagtccaattgttcatgatgaatttcatagaaaatatcaatctagaagatttatgaaagcttctataatttccgtccaatgggctttaaaggttagaaaaaacggctatgatataatgaccttgcatgaatga

SEQ ID NO: 3196 - DNA, 1452 bp, Saccharomyces cerevisiae
atggaaggtatgaatatgggtagcagcatgaatatggacgccatgtctagtgcatccaagacagtagcatcgagtatggcgtcgatgagcatggatgcgatgtctagtgccagcaaaacgatattatcgagcatgtcatcgatgagcatggaagcgatgtccagtgcgagcaaaacgttggcgtcgactatgtcgtcaatggcaagtatgtcgatgggaagcagttcaatgtcaggtatgtctatgtcgatgagcagtacaccaacaagctccgccagtgcacagacaacttctgattctagcatgtcaggcatgtcaggtatgtcatcgtctgataacagtagctcttcagggatggatatggacatgagtatgggaatgaactattatctgactcccacatataaaaactatccagttttgtttcaccatttgcatgcaaacaatagtggtaaggctttcggtattttcttattatttgttgtggctgctttcgtctacaaactactgcttttcgttagttggtgccttgaagttcactggtttaaaaaatgggacaagcaaaataaatattccactttaccttcagcaaactccaaagacgaaggaaaacattatgacacagagaataattttgaaattcaaggtttacctaagctgccaaatttattaagcgatatatttgttccatctttaatggatctctttcatgacattataagggcgttcttagtatttacctctacgatgattatttatatgttgatgcttgctaccatgtcttttgttttaacatacgtttttgctgtaattactgggttagctttatcggaagtcttcttcaatagatgcaaaatagccatgctaaagaggtgggacatccaaagagaaattcagaaagcgaagagctgtcctggcttcggtaactgccaatgtggtagacatcccgaacccagccctgatccaattgctgttgccgataccacttccggaagtgatcaaagtactcgcctggaaaagaacaacgaatctaaagttgcgatttccgaaaataatcaaaagaaaacacctacacaagaagagggatgtaattgtgccacagactcaggaaagaatcaagcaaacatagagcgcgacatccttgagaattccaagttgcaggaacagtccgggaatatggatcaaaacttacttccggccgaaaaattcactcataactaataactagacaaggttcgtccacctatatcttcttcttccaatatctctatacatcaaaataagaatatcgttcatttctcagaagctcaaaaaaaatctcaaaatggatacttctaatgccctcatgaagaggaaagaaaataatagacacagcgaccttcctataaataacagacttgtatatagttgaatgtctaagtaattttaattcaaaaatccttaactatatta

SEQ ID NO: 3197 - DNA, 1622 bp, Saccharomyces cerevisiae
agtaacacttgtcgaattgaaagtattttgccagtgatatttaggttcgagtaaagaaaatttcataaagaaatcaacaagacacaatgctgaaatacaggtctttgccaatcaagagagcaatccatcatccggcaccaggaattactccaatttctccccgtattatggtaagcaggttgagagtaataccatcttttaatttgaagttcaatcgttggaactcttcggtgccagaaagctcgaaaaaggagttaaaaacgacagacggaaaccaagaaagtgcgagtaaggtctctccagtaaaagagaaggaaaaagtaccctttaaggttaagatgcaaaaagcccttcgtcattattgggatggttccaaacttttggggttggagataaaaatttcttccaaattgctcatgaagagtgctgcaggctacccattgacgagaagagaaaatttacaactgaaaagaactactcaagatatcgttcggttggttccatttgctgctttcctcattataccctttgctgaacttcttcttccatttgcattaaagttattccccaatttacttccttctacttatgaatcaagtaaaaaacgcgagaataaactagaaaatttaagaaacacaaggaagttaatgtctgaaatcataaagaataacaagtcccattttaaacctaataatatttccgaggaacaaaaagctttgtttaacaggttctacacacatgtccgtgctacaggagtgccggagtctcgtcaacagctaatcgaagtagctagattattcactgatgatactgtattggataatgtgacaagaccttacttgattgcattagcgaagtatatgaatttgcaaccattcggcactgatgtgatgctacgttaccgtatcagatacaaaatgcttgaattgaaaaaagatgatctatctatatattacgaggatgcagaacaactctccctctctgaattgaaaacagcatgcgcctccagaggtattagaagtgtagacgtagagcctagcgtgttatattcgaatctaagattgtggctgaacatgaggctcaaggataagatcccatccacgctgttaatcatggctactgcctataactacggtaatgtgcaatcaaaggagtcattgtacgacgcattatgtgacgttttaatcggtatccctgatgaactataccatgaggttaaagtaaacgtcgttaaggaagatgaggcatccgctaagcaaaaattgaaacaattgagggagcaagaagaaattatgaaggaagaagagcagcaagaagagaacgccattgtgagcgtcaaggatgagttgagcttggacgaccaagacaagaacatagatgcggctgctccagacgtaaaaccgcatgacaccaagcctatcggagaagccgctgccatcaaagagaagtaacccagttttcacctggcccattaaaccgcacgatacactctccgctactctcgccaacattctttttatacatacttgcacgaaactgcttttttagcaatgaaaagaaaatgtagtgaactctactatagattttgtacataagataaataaaatacactactatatgaa

SEQ ID NO: 3198 - DNA, 1237 bp, Saccharomyces cerevisiae
cttcatctcaggactctctcttaaaattattttccttgccattttctatgttatgtagaatagaaaaacaggtacatattaactaaaatatacaccaaaaaaagtaaaaataaaatgtctgtcgccgatttgaaaaacaacatccacaagttagatactggctatggtttaatgagtttgacttggagagccgagcctatccctcagtcgcaggctttcgaggccatgcacagagtggttgagttatccagagaacgtgggcacaaggcctttttcaacgttggtgaattctatggtcccgattttattaatttgtcgtatgttcacgacttctttgcgaaatacccagatttgagaaaggatgtggttatcagttgtaaaggtggtgcagacaatgctaccttaacccccagaggcagtcacgatgatgttgtacaaagcgtaaagaattcagttagtgctattggtggctacatcgacatcttcgaagtcgcaagaatcgacacttccctatgcacgaaaggagaggtctacccctacgaatcgttcgaagcgcttgctgagatgatctccgaaggcgttattggcggtatttcattaagtgaagttaatgaagagcaaattagagctattcacaaggattggggaaagtttttgacctgcgttgaagtggaactttctttgttcagtaatgacattttacacaacggaattgctaaaacatgtgctgaattggggttgtccatcatctgctactccccactgggcagaggattgttgacaggtcaattgaagtcaaacgctgatatccctgagggtgactttagaaagtcgttaaagagatttagcgacgagtctttgaaaaaaaacctgaccttggtcaggtttctacaggaagaaatagtcgacaagcgcccacaaaacaactccattactcttgcacaactggctttgggatgggttaagcactggaacaaagttccggaatacagtggcgccaaatttatcccaattccaagtggctcttctatttccaaggttaatgaaaactttgatgaacagaaaaccaaacttaccgatcaagagttcaatgccattaacaaatatttgactactttccatactgttggtgacagatacgaaatggcgtaaggttaaaaaagtgaatctccattgtttatataaattttaaatttgatatgtaaagattctaaacgcaatgtgcttatttcagtaa

SEQ ID NO: 3199 - DNA, 1152 bp, Saccharomyces cerevisiae
gaagcattcatcgaaaaacagcagcaaggcaatgtcgcagtacatcggtaaaactatttctttaatctctgtgactgacaacagatatgtggggctgttagaagatattgactctgaaaagggtaccgtgactttgaaagaagttcgctgttttggtacagaaggtcgcaagaactggggtcctgaagaaatttatccgaatcctacggtatacaattctgtaaagttcaacggcagtgaagtcaaggatttaagcattttagatgctaacatcaatgacatacagccggttgttcctcaaatgatgccacccgcttcacaattccctcctcaacaagctcaatctccaccccaggctcaagctcaagcacacgtgcaaacaaacccccaagttccaaagcccgaatccaatgtgccagcagctgtcgctggatatggtgtttacaccccaacttcgacagaaaccgctactgctagtatgaatgataagagcactcctcaagacaccaatgtaaactcgcaaagtagggaaagaggtaaaaatggtgaaaatgagccaaaatatcaaagaaacaagaatagatcaagtaatcgccctcctcaatccaaccgcaatttcaaagtcgatattccgaatgaagattttgactttcaatcaaataatgcaaaattcacgaaaggtgattccactgatgtggaaaaagaaaaagaattagaatcagctgttcacaagcaggatgaatctgatgagcagttttataataaaaaatcgtcttttttcgacaccatctccacttctactgaaactaataccaatatgagatggcaagaagaaaaaatgttgaacgttgacacctttggacaagcttctgccagaccaagatttcactctagaggcctcggtcgtgggcgtggaaattataggggaaacagaggaaacagaggaagaggcggccaacgtggaaactaccaaaacagaaataactaccaaaatgatagtggcgcctatcagaaccaaaacgactcgtacagcagaccagccaaccagttttcgcaacctccttccaacgttgaattttaaaatgatgtttctatgtaaattaagtatatcattcagtatgtacatacaaaaatcaaattaatagtattata

SEQ ID NO: 3200 - DNA, 554 bp, Saccharomyces cerevisiae
caaactacaagaaaagatgggtaaaggtaagccaagaggtttgaactccgctagaaagttgcgtgtccacagaagaaacaaccgttgggccgaaaacaactataagaagagattattgggtactgccttcaagtcttctccattcggtggttcttctcacgccaagggtattgtcttggaaaagttgggtatcgaatccaagcaacctaactctgctatcagaaagtgtgttagagttcaattaatcaagaacggtaagaaggttactgctttcgttccaaacgatggttgtttgaactttgtcgatgaaaatgacgaagtcttgctagccggtttcggtagaaagggtaaggctaagggtgatattccaggtgttagattcaaggtcgttaaggtctctggtgtctccttgttggctttgtggaaggaaaagaaggaaaagccaagatcttaagcagagttatattacgatttcataattcgaaaaattctactgtgtatgtatatgtttaagagattaaataattcttcaaaatcatcaaacatcaagctta

SEQ ID NO: 3201 - DNA, 343 bp, Saccharomyces cerevisiae
ggcatcaaataactagatagtataaaatgtttggtctacctcaacaggaagtctccgaagaggagaaaagagctcatcaagaacaaactgagaaaaccttgaaacaggccgcttatgtggctgcgtttctttgggtttccccaatgatctggcatttggtgaaaaagcaatggaaataattccccactgaagaaaaaagattgcatctatgaatgacactaaaatatgtttctctttttgtatttgcttttgattaaataatggtcaatttgcgccccccaccttatatagtttagagaaagacgtgtaaatattttttaaaaaattgatactgctctaatga

SEQ ID NO: 3202 - DNA, 1852 bp, Saccharomyces cerevisiae
atgtcagatgttacccaacagaaaaagaggaaaagatccaaaggagaagttaatccatcaaaacccacagtagacgaagaaatcacagatccatcctcaaacgaagatgaacaactagaagtttcggatgaagaagacgcattggaatctgaagaagaattcgagggtgaaaatccagccgataaaagaaggaggcttgcaaagcaatatctggagaatctgaaaagcgaagctaatgacattttaactgataataggaacgctgaagaaaaagatttaaacaatctcaaggaaagaacaatcgacgagtacaacaattttgatgctggagatttggataaggatatcattgcgtccaggttaaaagaagacgttgctgaacagcaaggccgagtcttcagatattttggcgataaacttctaatatctgaagcaaaacagagctttaccagggtaggggaaaataaccttacttgcattagttgtttccaacccgttttaaacaaatacaccttcgaggaatcatctaatggcgataagaacaaaggtaggttatttgcctatacagttagcaaagacttacaactcaccaaatatgacattactgactttagcaaaagaccaaagaagctaaaatacgctaaaggaggagcaaaatatatacctacgagcaagcacgaatatgagaataccacagaaggccattatgacgaaatcttaactgtagcagcctcaccagatggtaaatatgttgtcacaggtggaagagataggaagttaattgtatggagcacagaatctctatcacccgttaaagttattccaacaaaggatcgccgaggggaagttttatcgttggcttttagaaaaaattctgatcagttatatgcatcctgcgcagattttaagataagaacatattcaataaatcaattttcccagttggagattctttatgggcatcatgatatagtggaagatatatctgcgttggcgatggaaaggtgtgttaccgttggtgcccgtgatagaacagctatgctttggaagattcctgacgagaccagactaacatttagaggtggcgatgaacctcaaaagctactaaggagatggatgaaagaaaacgctaaggagggagaagatggagaagtcaaatatcctgatgaatcagaggcacctttatttttctgcgagggtagtattgacgttgtgagtatggtggatgattttcactttataacaggctccgataatggtaatatatgtctatggtctctggcgaagaagaaacctatcttcacggaaagaattgcccatggtattttacctgagccctctttcaatgacatttcgggggaaaccgatgaagaattaagaaaaagacagttgcaaggcaagaaattgctacaaccattttggatcacatctctttacgctattccatattcgaatgtattcatatctggatcatggagtggatcgctaaaagtttggaaaattagtgataatctcagatcatttgagttgctaggtgaattatctggcgctaaaggtgtagttaccaagattcaggttgtagaaagtggtaaacatgggaaggagaagttccgtattttggctagtattgccaaagaacacagactcggtagatggattgcaaatgtttcaggtgccagaaatggtatatattcagctgtcattgaccaaacaggcttttagattgctgatattgccgtaattttccatgcccttttcactctctcagaacgcaaagcggctccggctcccaagtatatagaaataagcatatagaatgaaatgtatcttttgtaaaatatctaaaaaaaaa

SEQ ID NO: 3203 - DNA, 1280 bp, Saccharomyces cerevisiae
aaaatatttcattttcaaaaaaaaaaaaagtaaagttttccctatcaaatgtcttttagggatgtcctagaaagaggagatgaatttttagaagcctatcccagaagaagccccctttggagatttctttcatacagtacatcattactgaccttcggtgtatcaaaactgcttcttttcacatgctataatgtcaaattgaatggttttgaaaaattagaaactgccttggaacgttccaaaagggaaaatagaggccttatgacggtcatgaaccatatgagtatggtcgatgatccgttagtttgggcaacactaccatataagttatttacgtctttggacaacataagatggtctttgggtgcacataatatttgctttcaaaataaatttctggccaactttttctcacttggccaagtcctttcaacagaaagatttggggtgggcccatttcaaggttctatagatgcttcaataagattgttaagccctgacgacactttagacttggaatggacccctcactctgaggtctcttcttcgctaaaaaaagcctactccccgcccataataaggtcgaagccatcttgggtccatgtttatccagaaggatttgtactacaattatatccgccttttgaaaattcgatgaggtattttaaatggggtattaccagaatgatcctagaagcaacaaagccgcccattgtagtaccaatatttgctacagggtttgaaaaaatagcatccgaagcagtcacagattcaatgtttagacaaattctaccaagaaactttggctctgaaataaatgttaccataggggatcctttaaatgatgatttaatcgacaggtatagaaaagaatggacacatttggttgaaaaatactatgatcccaaaaatcctaacgacctctctgacgaattgaaatatggtaaagaggcgcaagatttaagaagcagattagccgctgaactgagagcccatgttgctgaaattagaaatgaagttcgcaaattaccacgcgaagaccctaggttcaaatccccctcatggtggaagcggttcaacaccacggaaggtaaatcggacccagatgttaaagtcattggcgaaaattgggcaataaggaggatgcaaaagtttctgcctccagagggtaaaccaaagggtaaggatgattgaaatttaagcaattaaattcgtgtaaatactagcatgtatgaggtcatttttacataacaaatattcattacttactttgcttttta

SEQ ID NO: 3204 - DNA, 1922 bp, Saccharomyces cerevisiae
taagaaaaagtataacttgctttacgctaaggatataaatcggacgtaacttaagatgtgtggtattttcgccgctttcaggcacgaagacgtgcatagatataagccaaaggctctacaactatcaaaaagaatcagacaccgtggtccagattggtccggtaatgctatcaagaactccactatatttgttcatgaaagactagccattgtcggtgtggaatccggtgctcaaccaattacttcttcagacggagagtacatgctatgtgttaacggtgaaatctacaaccacattcaattaagagaagaatgcgcagactacgagtttggaacactgagtgactgtgagcctatcatcccaatgtacttaaagcacgatatcgacgctcctaagtacttggatggtatgtttgcttggactctttacgacgctaaacaagatcgtattgtggcagccagagacccaatcggtattacgacattatatatgggacgctcttccgcttctccaaagaccgtttattttgcatccgaactaaaatgtttgactgacgactgtgacactatcactgcattcccaccgggccacgtatacgattctaagactgacaagatcacccgttacttcacaccagattggctggacgaaaaacgcattccttccaccccaatagattacatggcaattagacactccttagaaaaagccgttagaaagagattaatggccgaagtcccatacggtgttctattgtcgggtggtttggactcctctttaatcgcttccattgctgcccgtgaaactgcaaaggccactaacgatgtcgaaccatcaacttacgatagtaaggcaagacatctagcaggtatcgacgatgacggtaagctacacactgctggttggacaagtctccattcctttgccatcggtttaccaaatgctccagatttgcaagccgcaagaaaggttgccaaattcatcggctctattcatcatgaacacacctttacattacaagaaggtttggatgctttggacgacgtgatctaccatttggaaacttacgacgttaccactatcagagcttccactccaatgttcttactatccagaaagattaaggcccaaggggtcaagatggttctttccggtgaaggttccgatgaaatcttcggtggttatctatatttcgcacaagctccttctgcggcagaatttcacactgaatccgtgcaacgtgtcaagaacttgcatttggcagattgtttgagagctaacaagtctacgatggcttggggtctagaagctcgtgttccattcttagacagagaatttttgcaattgtgtatgaacatcgatccaaatgaaaagatgattaaaccaaaggaaggacgtattgaaaagtacattctaaggaaggcattcgacaccacaggagaaccagatgctaagccatatttaccagaagaaattttatggagacaaaaagaacaattttccgacggtgttggttactcctggatcgacggattaaaagataccgccgaagcagtcatttcagatgaaatgtttgccagtccaaaggccgaatggggtagtgacattccaaccacaaaagaggctttctggtacagactaaaattcgatgctttgttccctcaaaagaccgtggctgacaccgttatgagatggattccaaaggccgactggggttgtgctgaagatccttctggtagatatgcccaaattcatgaaaaacatatcgaataaataacattaaaaaatagaaaaagaattatggattaatcttatagatatttttatagaaaaacaaacactaacaataataataataataaatagaatatagaaatacatatttttcataatagtttgatgaagttttattcataaatca

SEQ ID NO: 3205 - DNA, 1078 bp, Saccharomyces cerevisiae
attgatcaagaaaaaatacaattgaaaaggttttacatttttaatttttctgctcatcgcgcttttttaaaaggataaataaacatttctttaaaaaacatcttcaataagaaaaatcggttaaaaaaacttttcttctcaaagcatacctaataacaatataatcccataatgctagccctagctgataacattctacgtataataaatttcctatttttggttatttccatcggtttaatcagttcgttgttaaacacccaacataggcacagctccagagtaaactactgtatgtttgcttgtgcatatggtatattcaccgattcattgtacggtgtctttgccaacttcattgaaccattggcatggccactagttttgttcacactggactttttgaactttgtgttcactttcactgccggtacagtgttggccgttggtatcagagctcactcatgtaacaacagctcatacgttgacagtaacaagattactcaaggttccggtaccagatgtagacaagctcaagccgctgttgcattcctctacttctcttgtgccatctttttggctaagaccctgatgtctgttttcaacatgatctccaatggtgcctttggttctggttctttctccaagagaagaagaactggccaagtcggtgttccaaccatttcccaagtctaattgaagcgcaccaacttaaattttacgccactttcaattaagaatataataaatggacaccgtgaataaattagggaaaaaagaaagcaaataagaaaactccgttttccctcatccctttccgtctttcggaagaaacaaaaaattatacccaaggaaaacccgaaaaaaatgaaaaaaataccagaaaaaaaataacaaatcatatgcacttcttcattaacgattatgaagaagtcttatttctaactaatattattattattattattattattatcattcaccccgctttcttttattataatttgttcttctaatattttaatttttaatcttttcatactattcttatatctaactaaagtatccttctctttgtcta

SEQ ID NO: 3206 - DNA, 1013 bp, Saccharomyces cerevisiae
acacaagaacattaggaaagaaggcaatctgatatttcaaaaatgtctgcttcattgattaatcgttccttaacaaacattaggacagaactggattttctaaaagggtcaaatgtcatttcaaatgacgtttacgatcaaataaataagagcttgccggcaaaatgggatcctgccaatgcaccccgcaacgccagtccagcttccttggaatatgtcgaagctctttatcaatttgatcctcaacaagatggtgatttgggcttaaaaccaggtgacaaggtccaacttttagaaaaattatctccagagtggtacaagggtagctgtaatggccgtaccggtattttcccagcaaactatgtcaagccagctttctctgggtctaacggtccatccaatcttccaccacctccacagtataaagctcaagaattacaacaaatccccacgcaaaatagtgccgcatcatcttatcaacagcagccatttcctccaccttccacaaattattatcagcagcctcaacaacagccgcaacaagctcctcctccccaacaacaacaacaacaacaacaacatcagagctcacatagccacttgaagagctttggtagcaaattgggtaatgccgccatttttggggcaggcgctagtattgggtcagatattgttaataatatcttttaagtcgtttttctctttatatacttcattcatttgttctccattatggccaaacctttcataaattgaacgaagttctacctttggtgttgttatccctagaatttttttctaatgagtatgaatttaagtaacctttttttttctttttttttaaacagatatatcgtatatggaggataatagtacatcacttatgatatgagcgagaaaatctgtctttttagtaaaaaagtataaaaagtaaaaaggcgtcgattttgcgttgatttctttatatttacgtctgtacaaaaaatacattaagaatatattcaatatcttcc

SEQ ID NO: 3207 - DNA, 2730 bp, Saccharomyces cerevisiae
acaaccgttaaaatatttttagcttacagaagcacttaagaatcactaacgttttcttctttttttattttcagtccaaagctttcgtattgctgcaagtgctcgagaaagctgcatattgttattgtattcgtcctctcgtactagtgttcattactttatcgtctataaatatattgttgttagaatttttctactaaggcaagttagtagttgcacaacatttctctcgttaaatcatctaaagtttacagaataggtataccactcactcctttactctaatgcctttgagaaatctaactgaaacgcacaactttagtagcacaaacctggacacagatggtacaggcgacgatcatgatggtgctcctctttcctcatctccttcttttggacaacaaaatgacaatagcaccaacgataatgctggtctcacaaacccttttatggggagtgacgaagaatctaatgcgcgggatggagaatctctgtcttcttctgttcattatcagccacaggggagtgactcttcactacttcatgacaattctcgtctagatctaagtcaaaataaaggtgtatctgattacaaaggttactattccaggaacaatagtagagctgtgagtacggctaatgataactcatttcttcagccaccacatagagctatagcctcttctccttctttgaattctaatttatcgaagaatgatattctctcaccgccagaatttgatagatatcccttagtgggttccagagtcacttctatgactcaactgaaccatcatggtcgctcgccaacatcatctccaggaaacgagtcgtccgcctcattctcttctaatccgtttttgggcgagcaagatttttctccatttggtgggtatcctgcttcatcgttcccacttatgatagatgaaaaggaagaagatgattatttacacaatcctgaccccgaagaagaggcaagactggatagaaggaggttcatagatgacttcaagtacatggataaaaggtctgctagtgggctagctggtgtattgctcttgtttctggcagccatctttatttttattgttttgccagcgttgacctttaccggtgctattgatcacgaaagcaacactgaagaagttacatatttaactcaataccaatatcctcaactatccgccattagaacatctctggttgacccagacacacctgatacagcgaagacaagagaagctatggatggctctaagtgggaattagtattttctgatgagtttaatgcagaaggcagaacattttatgatggggatgatccatactggacagcccctgatgttcactatgatgctactaaggatttagaatggtacagtccagacgcttccacaactgtgaacggaaccttgcagctgagaatggatgcctttaagaaccatggcttatattacagatcaggtatgttgcagagttggaataaggtttgtttcacgcagggtgctctagaaatctctgcaaatctaccaaattatggccgtgtttcaggtttgtggcccggtctttggactatgggtaatttagggaggcccggttatttggctagtacccaaggtgtctggccttattcttatgaatcgtgtgatgctggtattacacccaaccaaagttccccggatggtatttcttacttgccgggacaaaagttaagtatttgtacttgtgatggtgaagatcatccgaatcaaggtgttggtagaggagctccagaaattgatgttttggaaggtgaaactgatactaagattggtgtaggtatagcctctcaatccttgcaaattgcaccttttgatatctggtacatgcctgactatgattttatcgaggtttacaatttcacaacaacgaccatgaacacttatgctggcggtccatttcaacaagccgtatctgctgtctcaactttgaacgtaacttggtatgaattcggtgagtacggtggctactttcaaaaatatgccattgagtatctgaacgatgacgacaatggttatatccgttggtttgttggtgatactccaacttatactattcatgctaaagccttacatcctgatggtaatattggttggagaagaatcagtaaagaaccaatgtcgattattctaaatctgggtatttccaacaattgggcttatattgattggcagtatattttcttcccagtggttatgtcgattgactatgttagaatataccaaccaagtaatgctatatccgtgacatgcgatccaagtgactatccaacatatgattatattcaatcgcacttaaatgcattccagaatgcaaacttaactacttgggaagatgctggttacacgttccctaagaatatcctaactggtaaatgtactagctcgaagttcaagttatcctcttaagcgggtattttgatggtaaatctacaagccctcggctttaattattaccatggtcataaaaagttacttacaatgcatacatttttcttttaggaagaaataaaatataaaagacttatcgttcaaatcgggtcataaagggaactaaaggtatactaaggtaagacggggttctcatctgcacgtaattttttattatttttagtgagggagaactttacctctaagattgtttatataggtatacacatttttgtaaaactgattattcgttttttttttt

SEQ ID NO: 3208 - DNA, 1031 bp, Saccharomyces cerevisiae
cgtatatatttattttaccagcaggaattcgtctttaatatcgtttcgaccatcgatcattcctctgagtattgcaaaaacatttttggaacaacccaaacttaaagttacaaaactcaaaaaaggaacaaaattaataaaacaaaagaatcgctgttagaggtttattgttgcactaatagaaaatcatagaactttaaaaattatactagaaagatgtcacaacaagttggtaacagtatcagaagaaagctggtaatcgttggtgatggtgcctgtggtaagacatgtttattaatcgtcttttccaagggccaatttccagaagtctacgtaccaactgtctttgaaaactatgtagcagatgttgaagttgatgggcgtcgtgtagagctagcgctatgggataccgctggtcaagaagattatgatagactaagaccattgtcatacccagactccaatgtcgtattaatttgtttctctatcgatcttccagattctttagagaatgtacaagaaaaatggattgccgaagtattacatttctgtcaaggtgtgccaattattcttgttggttgtaaagtggatttgagaaacgacccacaaaccattgaacaattaagacaagaaggtcaacaacccgttacatcacaggagggacaatctgtagcagaccagattggcgcaaccggatactacgaatgttcggccaagactggttatggtgtcagagaagtgtttgaggccgccactagagcttcattgatgggtaaatctaaaacgaatggtaaagctaagaagaacactactgaaaagaagaagaagaagtgtgtcttgttataggagtgtctcgatctctcagtcgttaacttagtggcagatactgccctttttcaatcccattccttttctcattgtatgtacgtatgcctttttttgttattttagctctaactatagctacttgtttttctcccagtatgtgtataatcttattcttctctacatataagtgtattgctcagtaa

SEQ ID NO: 3209 - DNA, 1591 bp, Saccharomyces cerevisiae
tcgccacaattggaagaggaagcagctgggaaattagaaacaatccacgcatcagctatggcaaagagcaaaaaaaaaacagatgttgtcgattcaacaaacctgcccattctagaattactatcattaaaagctcccattttccagtctcttttacatcctgaactgcccattataataactggctttggtacaggacatattgtgtgccatcgttatgaccccgctaagttgcaatcgcacctagatcgtagacgtagaattgacactgcaactacaggcaaggatgcaaagaaaggtgtatgcccttggattagattagatatagacctagaaactggagatttgaaatttgttgatattgaagaacaacagcaacaaaagcaaacaggaaaagatgaagacttgggcgtaaaaacactttggaagactaaaagacataaaggtagtgtccgtgccatgtgctttgattctaaaggtgacaatattttttctgttggatcggataatgttttaaaaaaggccaatactatgaccggcaaagtcgtcaaaaaggtaaacttaagctcactgtttaattctgaagagaaaaaaaatgataaatttacgaaattatgcgcctctcaaactcacccattcattttaataggcgatgaatccggtaatatacacgtaataaactcggaaaacttggcattatcaaattccattcgttcgatacattttggcgactctatcaacgatattttccactttgataaaagatctgcatataaattcatttctttgggccagacaacgttagcttattttgacgttcgcgacaaagatgccaaaccgaacgtagctggaaacgaggatggtaaaattttgatcagcgatgatcaggaggacgaagttctttgtggttgtttcgtcgatcccgaagtagcagatacccttttgtgtgggatgggcgagggtattgttaccgtctggaaaccgaataagaatgatttggaagatcaaatgagccgtattaaaattagcaaagatgaaagtatcgattgcattgttcctactttacaagatgataactgtgtatggtgtggttgttccaatggtaacatttataaagtaaatgccaaattgggaaaagtcgtcgagataagaaaccacagtgaattggatgaagtcagttttgttgatctagattttgaataccgtgttgtttctggtggtttggaaaacatcaagatatgggaattatcgagtgatgatgtagaggaaaatgcatcggtagagtccgatagcgacgaacccctctcccactctgatgaggatctaagtgatgacactagttctgatgatgaaacgacgcttgtcgggctctcaaaggaagagctattagacgaattagataaggacctcaaggaagatcatcaagaggaaaaagaatccaactcaaaatctgtcaaaaaaagaaaaataatgaaggagaacaacaaaaaaaaggacctgtatgagcatgggatcaagaagtttgatgatttatagattatttcttttttactaagaaaaacatatatcatttatattcagaaataaatag

SEQ ID NO: 3210 - DNA, 456 bp, Saccharomyces cerevisiae
atgagacccgttgtatccactggtaaggcatggtgttgtaccgtcctatcggcatttggtgtagtaattctttccgtcattgctcatctcttcaacacaaaccatgaatcctttgtaggatcaataaacgatcctgaagatggacctgctgttgcacatactgtttatttggctgccttggtatacctcgtgtttttcgtattctgtgggttccaagtttacctagccagaagaaaaccttcgatcgagttgcgttagtcttgaagccaataggataataccaaatgcattaatatcgtccaactgttctatatacttatcgtaacctcgttccatgtgacattcttttttattacacttttcgacaatagcgaattgagtgaaatattatgaaagaatatatagtataaatatatacatttatatatgaattctaatcaataaaagtcacagtaa

SEQ ID NO: 3211 - DNA, 603 bp, Saccharomyces cerevisiae
atggcttggactagtacattaccagcgcatctactgaacctgatcaaaaactccaaatatgttcacgtggccacctgttctaaagactgcatcccttcagtggcattgatgaactatatctatgtgccaggtgaaaaactgttcggtcaaacagataataagaatgactacattatatttgtttctcctcaggacacacaaaagttttacaacatcaaggagaaccctaaggtcgccctgttgtttcacgattggatcatcgcgaataatttgtcagtgggcaaggaaagcatctctgggactccgacgccgacttctattcctcatgaagagcaacgtcaaagcgagcttttaaatttgttacaggagttaaatcaagccgaattgaaccaaatgagcgcatctattggtggcgaaaccgaaattgtcaatcctgaaagtgaagaatccaagtactataaagatttaatactaaaggctaatcctgatgcgaaagcttttatatttgaaaagaacaccgccgttgttaaagttagaattgataatgctagggtatccaataatgagaacagaacaatgtttctaagtaaagggaagagttaa

SEQ ID NO: 3212 - DNA, 397 bp, Saccharomyces cerevisiae
cacacacagcaccgcgtactataccacaccacacactacgtcacaacacaacaagacaatgagcgagagcagtgatatcagcgcgatgcagccggtgaacccgaagccgttcctcaaaggcctggtcaaccatcgtgtaggcgtcaagcttaagttcaacagcaccgaatatagaggtacgctcgtgtccacggacaactactttaacctgcagctgaacgaagcagaagagtttgttgcgggtgtctcgcacggcaccctgggcgagatattcatccgctgcaataacgtgctgtacatcagggagctgccgaactaagacgactgtgctcatctcccttacataccagtatatttacatacgccctctactgtaatacaatatcattctatagca

SEQ ID NO: 3213 - DNA, 930 bp, Saccharomyces cerevisiae
ctatcgcttcaattacacacaaacatacacgcacccacaatgagcatcgaatactctgttatcgttcccgcttaccatgaaaagctgaacatcaaacccttaacaaccagattgtttgccggcatgagccctgaaatggccaagaagaccgagttgatctttgtcgatgacaactcacaggatggctccgttgaggaggtggacgccctagctcaccaaggctacaacgtccgcatcatcgtcaggacaaatgaacgtggtctatcctccgccgtgcttaagggtttctacgaggccaagggtcagtacctggtatgcatggacgcagacctacaacaccctccagagaccgtgcccaagttgttcgagtctttgcacgatcacgcctttactctgggcaccagatatgccccaggtgtcggcattgacaaggactggcctatgtacagacgcgtcatttcctccactgctagaatgatggccagacctttgaccatcgcctccgaccccatgagcgggttcttcggtctacaaaagaagtacctcgaaaactgcaaccctagggacatcaactcgcaaggtttcaagattgccctcgagcttctcgccaagcttcctcttccaagagaccctagagtggcgatcggcgaagtgccattcactttcggcgtgagaacggaaggtgaatccaaactgtcaggtaaagtcattatccaatacttgcaacaacttaaggagctctacgtcttcaagtttggcgccaataaccttatccttttcattactttctggtccattctgttcttctacgtttgctaccagctataccatttggtcttttaaaggaagtgaatggtaacgaaaaaaaaaaatctttctttatatgtctctttaagtactccctttcagttatatgccttttattgtctg

SEQ ID NO: 3214 - DNA, 569 bp, Saccharomyces cerevisiae
aaagattaaggctacaagtgatcatgtcagactacgaggaggcgtttaacgacggtaatgagaacttcgaagattttgatgtagagcatttttctgatgaggagacttatgaggaaaaacctcaattcaaggatggtgaaacaaccgatgccaacggtaagaccatcgttactggtggtaatggcccagaagattttcaacagcatgagcaaataagaagaaagacacttaaggaaaaggccatcccaaaagaccaaagagcaactactccatacatgaccaaatatgaaagggcaagaattttaggtacaagagccctacaaatttccatgaatgcgccagtttttgtagatttagaaggtgaaactgatccattgcgtattgccatgaaggagttggctgaaaagaaaattcctttggttattagaagatatttaccagatggttcctttgaggactggagtgtggaggaactcattgtggatttgtgattacacctgcattttcctttatgtgtatttgctttgtttgtatattattataactataaagaacgatttattttgtaa

SEQ ID NO: 3215 - DNA, 1355 bp, Saccharomyces cerevisiae
gttaataaggtttttaacagcagtgtgctcgaacgattaggacgggagagttaaaattattaaaaggaaaaaagaagaacgttgatgttgtcagcagctagattgcaatttgcccaggggtcagttagaaggttgaccgtttccgctagagacgcacctactaaaatatctacattggctgttaaggtccatggagggtctcgttatgcaaccaaggatggtgtggcccatcttttaaacagattcaactttcaaaacacgaacactagatcagctttgaaattagtcagagaatccgaattattagggggaacttttaagtctaccttggatagggaatacatcactttgaaagctacctttttgaaggacgaccttccctactacgtcaatgccctagcagacgtgctatacaagactgccttcaaacctcacgagctcaccgaatctgttttgcctgctgctagatacgattatgcggtcgctgaacaatgtccggtaaagagcgccgaagaccaattgtatgccattacattcagaaagggtttaggaaacccattgttatacgatggtgtggaaagagtcagtttgcaagatatcaaggactttgcggacaaagtctataccaaggagaaccttgaagttagcggtgaaaatgttgttgaggccgatttgaaaagatttgttgacgagtcactgttaagcactttgcctgcaggtaagtcattggtgagtaaatccgaaccaaaattctttttgggtgaagaaaacagggtaaggtttatcggtgactccgttgccgccattggtatcccggtaaacaaagcctccctagctcaatatgaagtattggccaactatttgacctctgccctatccgagctttccggtttaatcagctcggctaaacttgataaattcactgacggcggcctatttactctgtttgtaagagaccaggacagcgccgtggtatcttccaacatcaagaaaattgttgcggatttgaagaagggcaaggacttatcccctgcaataaattacacaaagttaaagaatgccgtccaaaatgaatctgtttccagcccaattgaactaaattttgacgccgtgaaggactttaagttgggaaaattcaactatgtagccgtcggtgatgtttccaacttgccatatttggacgaattgtaagaggaaagtatttgtacaaaacgaaaaactaaaggcaaatatatatatagatgttgccgcgcaccttttttttaatgaatattcacacaaatattgaaaataaaaacaaacaaaattcaaataacaacatgtaagaccaaaaaaaaatccctcattatttattc

SEQ ID NO: 3216 - DNA, 1726 bp, Saccharomyces cerevisiae
atgaagagtactttgagtttaactttatgtgttatatcgcttctattaaccctttttctggcggccttggatattgttatagtggttactttatatgatacaattggcattaagttccatgacttcggcaatattggttggttagttactggatatgctctttctaatgctgttttcatgttattatggggtcgcttggccgaaatacttggtacaaaggagtgcttaatgatttctgttattgtatttgaaatagggtctttgatttctgctctttcgaattcaatggcgactctgattagcggaagagtcgttgctgggtttggaggaagtggaattgaatcacttgcttttgtagttggaacatccattgtccgagaaaaccatagaggaattatgataacggcactcgctatatcgtatgtcattgcagagggagtcgggccttttattggtggtgcatttaatgaacatttgtcttggagatggtgcttttatataaatcttccaatcggtgcgtttgcgttcataatattggcattttgtaacacatctggagaaccacatcaaaaaatgtggctaccatcaaaaatcaaaaaaattatgaactatgactatggcgaattattgaaagcaagtttttggaagaatacatttgaagtacttgtatttaaactagacatggttgggattattttatcttcagcaggctttacactactgatgttaggtctttcatttggtggaaacaacttcccatggaattcgggtatcattatttgcttttttaccgtgggccctatcttattgttactattttgtgcttacgactttcattttctgtcattatcggggcttcactatgacaacaagcggatcaaaccgttactgacatggaatattgcctcaaattgtggcatatttacaagctccataacaggattcctttcttgctttgcttatgaattacagtctgcttatttagtccagctttatcaactagtatttaaaaaaaagcctacattagcgagtatacatctttgggaactatcaattccagctatgattgcaactatggccatagcatatctaaattcaaaatatggcatcatcaaaccggcaattgtttttggtgtgctttgtgggattgttggatctggtttatttacgctaatcaatggcgaactctctcagtcaataggttattcaattctcccaggaatagcttttggtagtattttccaagcaacgttattaagctcccaggtgcagataacatcagacgatccagactttcaaaacaagtttattgaagtcacagctttcaactcgttcgccaaatccttgggctttgcgtttggagggaatatgggggcaatgatattcactgcatcactcaaaaaccagatgcgctcttcccaattaaacataccacaatttacgtctgtagaaacacttttagcgtatagcacagaacattatgatggcccccaatcttcactatcaaagttcataaacacagctatccatgacgttttttactgcgccttaggatgctatgctctttcattcttctttggaatattcacttcgagtaagaaaacaacaatatcagccaaaaagcaacaatgaacaattttccaacgtataaattaacttatcgtagttcgataaaactagacagtacttatatattatctaacatcagatggtttgtctttcatta

SEQ ID NO: 3217 - DNA, 369 bp, Saccharomyces cerevisiae
gtggaacagtggtaattcctacgattaagaaacctgtttacagaaggatccccacctatgggcgggttatcagatattatcaggtgggaaattcggtggaacacagtggagccttgtcctccgggttaatgtcgcttttggcattggcccctgctcctgagagaagaaatatactggggaaccagtctttaccgaccgttgttatcagaaattcacggagttcggcctaggtcggactccgatgggaacggcaacggttgttccgtttgacttgtcgcccgctacggcgtgagcgtcaaggtctgttgagtgcaatcgtaggacgtcattagtggcgaacccgataccgattactgctgctgttccagc

SEQ ID NO: 3218 - DNA, 2197 bp, Saccharomyces cerevisiae
tgttcactcattttacatcaaaaaataatatttcagttattaaggaaaataaaaaaatagattagagaagcattttgaagaaatagtatattcttttattgaacctaagagcgtgatatttttactcgaaataaaatacgaaaaatctatacactcatctttccgactactattggctcctgctcaaaaaaagagggaaaaaaagctccaaaattctatcttttcctatcgctcctgtcctatccttattacgttcattactattttaatactatccattcttttattttcagtctaaaaaaaacatttctcataacgggaaaagcaaaaaaatgtcaagcttatacatcaaaacaccactgcatgcattatctgctggtccggattctcatgcaaatagctcctattatgacaatcttttattgccttcattttccaatttatccagtaatatcagcaggaacaatatcacaaccgataacaatataaattcagcaagtcctaggaagtattcgtttcattcgctcaatgtgtcgccaattctttccccaatatctttggctaacgaaatacttggaaaaaaatcaaatactgcaccagcatcgccacatcatatggattacaatccaatttcctcattaacaccaggcaattcaccagaattcaacaaggcaagcttatctcagattagttttacaaatccattgaactatgggtctggcttaggtttttcctctaattcacaacctcgactaccattgttagacaggctatcgtccgtctctttatctaagagaccggagcgcccacaacaaagcctaccatcactaaggcatctgcaattattacccagtcctcttttacaagaaaacgcagcacgcttccctgatacatcaaaacgtacatctaattggaaaactgatcttacccattggtgtaaggatacaaactatcaagactatgttaaaatacgcgaagaagtggctcatttcaagccattaagtatacccaacttaactaataatcaaaataatgatagtttcaattacggcaaggaattggaatcgactaggtcgtccaagttccattccccgtctaaggaatcatttgatcgtaccaaactaattccttcgattctagaagctaaagatcaatttaaagatctttccaacaatgcatggagtattactcctcccgtcacaccgccgatgagtccaccaaccaatagaaccatggagcgcacgacgcttagaggagtagaggcctctttttttgaggggaaatccagcaataacgattcaatattcaatccaattattagtgaaaaattggttcaagaagttaaacatcaaagacaattacgtggaaattcatttcccatgccaaatgccagtcacaaaaagacgaacagtttcaaagctttgcaaataaaaaaattgcttgcgaatagagacattctatcgaacaattccaaatctaatgtaaggaaaccatctaagaacaaaatctcaaagcaagcatcaaatgttttcggtaacactgcaagacaattggtgatgaaactcgacaacgctagttacagttctgtctctgcatcttcatctccatctccctccacaccgacgaaaagtggcaagatgagatcaagatcatcctcacctgtgcgtcccaaggcatacactccaagcccaaggtcacccaattatcatagatttgctctcgactctccccctcaaagccctcgaagatcatcaaattcaagcataacgaaaaagggaagtagaaggtccagtggctcatcacccactcgtcacaccacaagagtgtgcgtgtcgtgtcattcgagtgattcgccctgttggaggccatcgtggtcgccaagaaagcaagatcagctatgtaactcttgtggtcttcgatataaaaaaacacatacaagatgtttgaacgatttatgtcgtaagatccccacaaagggtgaaataaacattatgaaatccaatggaatagacaaagaattcgtccccgaacgcaactgcgaaattgaagggtaccgttgcttattttgtaattacataactgagacagtagagaattgatacatggataactgaatctctttcaactaataagagacattatcacgaaacaattgtacatttctctccttgtctgtgctaaataaactacaaataaa

SEQ ID NO: 3219 - DNA, 1402 bp, Saccharomyces cerevisiae
caactatacaaagacgaaagcttccttactcgaggttgaaaagaatagcaaaaatctttccttttcaaacagctcatttggaattgtttatagcactgaattgaatcgaagaggaataaagatcccccgtacgaacttctttatttttagtttttcattttttgttattagtcatattgttttaagctgcaaattaagttgtacaccaaatgatgaataacaacggcaaccaagtgtcgaatctctccaatgcgctccgtcaagtaaacataggaaacaggaacagtaatacaaccaccgatcaaagtaatataaattttgaattttcaacaggtgtaaataataataataataacaatagcagtagtaataacaataatgttcaaaacaataacagcggccgcaatggtagccaaaataatgataacgagaataatatcaagaataccttagaacaacatcgacaacaacaacaggcattttcggatatgagtcacgtggagtattccagaattacaaaattttttcaagaacaaccactggagggatatacccttttctctcacaggtctgcgcctaatggattcaaagttgctatagtactaagtgaacttggatttcattataacacaatcttcctagatttcaatcttggcgaacatagggcccccgaatttgtgtctgtgaaccctaatgcaagagttccagctttaatcgatcatggtatggacaacttgtctatttgggaatcaggggcgattttattacatttggtaaataaatattacaaagagactggtaatccattactctggtccgatgatttagctgaccaatcacaaatcaacgcatggttgttcttccaaacgtcagggcatgcgccaatgattggacaagctttacatttcagatacttccattcacaaaagatagcaagtgctgtagaaagatatacggatgaggttagaagagtttacggtgtagtggagatggccttggctgaacgtagagaagcgctggtgatggaattagacacggaaaatgcggctgcatactcagctggtacaacaccaatgtcacaaagtcgtttctttgattatcccgtatggcttgtaggagataaattaactatagcagatttggcctttgtcccatggaataatgtcgtggatagaattggcattaatatcaaaattgaatttccagaagtttacaaatggacgaagcatatgatgagaagacccgcggtcatcaaggcattgcgtggtgaatgaaggctgctttaaaaacaagaaagaaagaagaaggaggaaaagaaggttataagggtatgtatataggcagacaaaaaggaaaattaagtgcaaatataaacaaaaatgtcatagaagtatataatagt
